(19) United States
(12) Patent Application Publication
(10) Pub. No.: US 2021/0260182 A1
(43) Pub. Date: Aug. 26, 2021

(54) RECOMBINANT POXVIRUS BASED VACCINE AGAINST SARS-CoV-2 VIRUS

(71) Applicants: Scott J. Goebel, Frederick, MD (US); David Evans, Edmonton (CA); Ryan Noyce, Edmonton (CA); Tonix Pharmaceuticals Holding Corp., Chatham, NJ (US); The Governors of the University of Alberta, Edmonton (CA)

(72) Inventors: Seth Lederman, South Dartmouth, MA (US); Scott J. Goebel, Frederick, MD (US); David Evans, Edmonton (CA); Ryan Noyce, Edmonton (CA)

(21) Appl. No.: 17/187,678

(22) Filed: Feb. 26, 2021

Related U.S. Application Data
(60) Provisional application No. 63/114,514, filed on Nov. 16, 2020.
(60) Provisional application No. 62/981,997, filed on Feb. 26, 2020.

(51) Int. Cl. A61K 39/215; C12N 7/00; C12N 15/85

(52) U.S. Cl. CPC A61K 39/215; C12N 7/00; A61K 2039/70; C12N 2710/24134; C12N 15/85

(57) ABSTRACT

The invention relates in various aspects to a recombinant poxvirus comprising a nucleic acid encoding a SARS-CoV-2 virus protein, methods for producing such viruses and the use of such viruses. The recombinant poxviruses are well suited, among others, as protective virus vaccines against SARS-CoV-2 virus.

### CROSS-REFERENCE TO RELATED APPLICATIONS

[0001] This application claims priority and benefit from U.S. Provisional Application No. 62/981,997, filed Feb. 26, 2020 and U.S. Provisional Application No. 63/114,514, filed Nov. 16, 2020, the contents of which are hereby incorporated by reference in its entirety.

### SEQUENCE LISTING

[0002] The instant application contains a Sequence Listing which has been submitted electronically in ASCII format and is hereby incorporated by reference in its entirety. Said ASCII copy, created on Feb. 26, 2021, is named 104545-0047-101-SL.txt and is 766,062 bytes in size.

### BACKGROUND OF THE DISCLOSURE

[0003] On Dec. 31, 2019 the Wuhan Health Commission reported a cluster of atypical pneumonia cases in the city of Wuhan, China. The first patients began experiencing symptoms of illness in mid-December 2019. Clinical isolates were found to contain a novel coronavirus. As of Jan. 28, 2020, there are in excess of 4,500 laboratory-confirmed cases, with >100 known deaths. The novel coronavirus is currently referred to as SARS-CoV-2 or 2019-nCoV and is related to Severe Acute Respiratory Syndrome coronavirus (SARS-CoV), although with only approximately 80% similarity at the nucleotide level. Ralph et al. J Infect Dev Ctries. 2020 Jan. 31; 14(1):3-17.

[0004] Coronaviruses are enveloped single stranded RNA viruses with positive-sense RNA genomes ranging from 25.5 to ˜32 kb in length. The spherical virus particles range from 70-120 nm in diameter with four structural proteins.

[0005] Despite the fact that a much effort is currently being invested into methods of providing vaccines and delivery vectors for SARS-CoV-2, there is still a need to provide additional and improved approaches against this coronavirus.

### SUMMARY OF THE DISCLOSURE

[0006] An aspect of the present disclosure provides a recombinant poxvirus comprising a nucleic acid encoding a SARS-CoV-2 virus protein, methods for producing such viruses and the use of such viruses, for example, as immunogens, in immunogenic formulations against SARS-CoV-2 virus. Another aspect of the present disclosure provides a recombinant synthetic poxvirus comprising a nucleic acid encoding a SARS-CoV-2 virus protein, methods for producing such viruses and the use of such viruses, for example, as immunogens, in immunogenic formulations against SARS-CoV-2 virus. In some embodiments, the synthetic poxviruses are assembled and replicated from chemically synthesized DNA which are safe, reproducible and free of contaminants. Because chemical genome synthesis is not dependent on a natural template, a plethora of structural and functional modifications of the viral genome are possible. Chemical genome synthesis is particularly useful when a natural template is not available for genetic replication or modification by conventional molecular biology methods.

[0007] In one aspect, the disclosure relates to recombinant poxviruses comprising a nucleic acid encoding a SARS-CoV-2 virus protein, wherein the SARS-CoV-2 protein is selected from the group consisting of the spike protein (S), the membrane protein (M) and the nucleocapsid protein (N), or combinations of two or more of said proteins.

[0008] In another aspect, the disclosure relates to pharmaceutical compositions comprising the recombinant poxviruses of the disclosure.

[0009] In another aspect, the disclosure relates to cells infected with the recombinant poxviruses of the disclosure.

[0010] In another aspect, the disclosure relates to methods for selecting a cell that expresses a SARS-CoV-2 virus protein, comprising infecting said cell with the recombinant poxvirus of the disclosure and selecting the infected cell expressing said SARS-CoV-2 virus protein.

[0011] In another aspect, the disclosure relates to methods of inducing an immune response against a SARS-CoV-2 virus in a subject in need or at risk therefor, comprising administering to said subject an immunologically effective amount of a recombinant poxvirus of the disclosure.

[0012] In another aspect, the disclosure relates to methods of generating the recombinant poxviruses of the disclosure, the methods comprising: (a) infecting a host cell with a poxvirus; (b) transfecting the infected cell of step (a) with a nucleic acid encoding a SARS-CoV-2 virus protein to generate a recombinant poxvirus; and (c) selecting a recombinant poxvirus, wherein the nucleic acid encoding a SARS-CoV-2 virus protein is located, upon transfection, in a region of the poxvirus that is not essential for the replication of the poxvirus.

### BRIEF DESCRIPTION OF THE DRAWINGS

[0013] For the purpose of illustrating the disclosure that are shown in the drawings and various embodiment(s) of this disclosure. It should be understood, however, that the disclosure is not limited to the precise arrangements and instrumentalities shown in the drawings.

[0014] FIG. 1. Schematic representation of the linear dsDNA synthetic HPXV (GenBank accession Number KY349117) and synthetic VACV (synVACV) (GenBank accession Number MN974381) genomes. The Thymidine Kinase (TK) gene locus is depicted in orange. The TK gene locus in HPXV is located at genome positions: 92077-92610 with gene ID HPXV095 (SEQ ID NO: 1). The TK gene locus in VACV is located at genome positions: 83823-84344 with gene ID synVACV_105 (SEQ ID NO: 2).

[0015] FIG. 2. Schematic representation of the TK gene locus (HPXV095) of HPXV of approximately 4 kb, located between the HPXV094 and HPXV096 flanking regions.

[0016] FIG. 3. Sequence alignment of the TK gene locus of synthetic HPXV and synthetic VACV ACAM2000, where it is shown that the nucleotide similarity is around 99%. FIG. 3 refers to SEQ ID NOs: 34-36, respectively, in order of appearance.

[0017] FIG. 4. Schematic representation of the linear dsDNA HPXV, showing the generation of the PCR fragment encoding the SARS-CoV-2 expression cassette. The expression cassette is introduced in the TK gene locus of the HPXV genome and comprises the SARS-CoV2 Spike S gene that is operatively linked to a vaccinia virus early and late promoter inserted upstream of the SARS-CoV-2 Spike S gene.

[0018] FIG. 5. Schematic representation of the HPXV and VACV, ACAM 2000 rescue viruses and the insertion of the synthesized expression cassette encoding the SARS-CoV-2 Spike S protein by recombination with the left and right recombination flanking arms.

[0019] FIG. 6. Schematic representation of the method of generating a recombinant HPXV, which comprises (1) infection of BSC-40 cells with the HPXV expressing yfpgpt cassette in the HPXV095 locus; (2) transfection of the infected cells with the synthesized Expression Cassette 24 hours post infection; (3) Harvest the cell lysate, release progeny virus of HPXV and recombinant HPXV expressing SARS-CoV-2 Spike S protein (rHPXV-SARS S) with repeated cycles rounds of freeze/thaw 48 hours post infection/transfection and (4) selection of cells comprising the rHPXV-SARS S.

[0020] FIG. 7. Schematic representation of the selection and purification of a recombinant HPXV comprising SARS-CoV-2 S protein, which comprises (1) previous steps of infection/transfection; (2) the harvest and cell lysis of the cells to release the control HPXV and the rHPXV-SARS S progeny; (3) plate titrations of progeny virus on BSC-40 cells; and (4) look for non-fluorescent plaques with a fluorescent microscope. Virus progeny that have replaced the yfpgpt cassette with SARS-CoV-2 S are non-fluorescent.

[0021] FIG. 8. Early, late and overlapping early/late Vaccinia Virus promoters. Core, spacer and initiator (init) are shown. Panel A shows the Early promoter nucleotide sequence (SEQ ID NO: 3); specific nucleotides required for optimal expression are indicated using the 4-base code; noncritical nucleotides are indicated by N; a purine must be present within the init region. Panel B shows the Late promoter nucleotide sequence (SEQ ID NO: 4); the T-run and TAAAT init sequence provide high expression. Panel B shows the synthetic Early/Late promoter nucleotide sequence (SEQ ID NO: 5); the elements of the early and late promoter are indicated above and below the sequence, respectively.

[0022] FIG. 9. Nucleotide sequence of variations of the overlapping early/late Vaccinia Virus promoters, comprising different spacers 3′ of the late promoter. Panel A shows a 38-nucleotides spacer (SEQ ID NO: 40; full-length sequence of promoter and spacer recited in SEQ ID NO: 37); Panel B shows a 99-nucleotides spacer (SEQ ID NO: 41; full-length sequence of promoter and spacer recited in SEQ ID NO: 38) and Panel C shows a 160-nucleotides spacer (SEQ ID NO: 42; full-length sequence of promoter and spacer recited in SEQ ID NO: 39).

[0023] FIG. 10. Schematic representation of the method of generating a recombinant scHPXV or synVACV comprising a nucleic acid encoding a SARS-CoV-2 S protein, which comprises (1) infection of BSC-40 cells with the rescue HPXV or VACV virus and (2) transfection of the infected BSC-40 cells with a PCR-generated fragment in the TK gene locus, wherein the PCR-generated fragment comprises the engineered SARS-CoV-2 S gene expression cassette. The SARS-CoV-2 S gene contains one or more modifications (at least Y459H is present). The resulting modified S protein is adapted to infect mice. The vaccinia Early Transcription Terminator Signal ETTS (T₅NT (SEQ ID NO: 14)) are also removed from the SARS-CoV-2 S gene through coding silent mutagenesis to generate full length transcripts during the early phase of the infection.

[0024] FIG. 11. Western blot of SARS-CoV-2 Spike protein expression from BSC-40 cells infected with synVACVΔA2K105^{yfp-gpt} or synVACVΔA2K105^{SARSCoV2-SPIKE-co::nm} (TNX-2200) clones 1.1.1.1.1 or 2.1.1.1.1. “Mock” represents a negative control group with no virus. “Mr” is a set of molecular weight markers in kiloDaltons (kDa). The labels on the right identify various proteins: “S multimer”: the Spike multimer protein; “FL S-G”: the full length glycosylated spike protein; “FL S”: the full length spike protein; “VACV I3”: the single stranded DNA binding 13 protein (an internal control); “SPIKE-co::nm”: a spike protein that is codon optimized and has no marker, indicating there is no YFP-GPT expression.

[0025] FIG. 12. Western blot of Spike protein expression from BSC-40 cells infected with synthetic TNX-801, TNX-1800a-1, or TNX-1800b-2. “Mock” represents a negative control group with no virus. “kDa” is kiloDaltons (molecular weight). The labels on the right identify various proteins: “S multimer”: the Spike multimer protein; “FL S-G”: the full length glycosylated spike protein.; “FL S” the full length spike protein; “VACV I3”: the single stranded DNA binding 13 protein (an internal control).

[0026] FIG. 13. Schematic of day 7 cutaneous reactions (“takes”) in African Green Monkeys (AGM) vaccinated with a 2.9×10⁶ PFU TNX-801. Panel A shows a female AGM (Animal #: 1F 16986); Panel B shows a female AGM (Animal #: 1F 16994); Panel C shows a male AGM (Animal #: 1M 16975); and Panel D shows a male AGM (Animal #: 1M 16977).

[0027] FIG. 14. Schematic of day 7 cutaneous reaction (“takes”) in African Green Monkeys (AGM) vaccinated with 1.06×10⁶ PFU TNX-801. Panel A shows a female AGM (Animal #: 2F 16985); Panel B shows a female AGM (Animal #: 1F 16991); Panel C shows a male AGM (Animal #: 2M 16980); and Panel D shows a male AGM (Animal #: 1M 16983).

[0028] FIG. 15. Schematic of day 7 cutaneous reaction (“takes”) in African Green Monkeys (AGM) vaccinated with 2.9×10⁶ PFU TNX-1800b-2. Panel A shows a female AGM (Animal #: 3F 16988); Panel B shows a female AGM (Animal #: 3F 16995); Panel C shows a male AGM (Animal #: 3M 16976); and Panel D shows a male AGM (Animal #: 3M 16982).

[0029] FIG. 16. Schematic of day 7 cutaneous reaction (“takes”) in African Green Monkeys (AGM) vaccinated with 1.06×10⁶ PFU TNX-1800b-2. Panel A shows a female AGM (Animal #: 4F 16989); Panel B shows a female AGM (Animal #: 4F 16990); Panel C shows a male AGM (Animal #: 4M 16972); and Panel D shows a male AGM (Animal #: 4M 16973).

[0030] FIG. 17. Schematic of day 7 cutaneous reaction (“takes”) in African Green Monkeys (AGM) vaccinated with 0.6×10⁶ PFU TNX-1800a-1. Panel A shows a female AGM (Animal #: 5F 16992); Panel B shows a female AGM (Animal #: 5F 16993); Panel C shows a male AGM (Animal #: 5M 16979); and Panel D shows a male AGM (Animal #: 5M 16981).

[0031] FIG. 18. Stained plates showing cytopathic effects in BSC-40, HeLa and HEK 293 cells 48 hours after infection with TNX-801, TNX-1800b-2, TNX-1200, or TNX-2200.

[0032] FIGS. 19A, 19B, 19C and 19D. Viral growth curves in BSC-40, HeLa and HEK 293 cells over time. FIG. 19A shows cells infected with TNX-1200; FIG. 19B shows cells infected with TNX-2200; FIG. 19C shows cells infected with TNX-801; and FIG. 19D shows cells infected with TNX-1800b-2.

[0033] FIGS. 20A and 20B. Viral growth curves in BSC-40 cells infected with a synthetic horsepox virus (HPXV) over time. FIG. 20A shows viral titer (PFU/mL) measured in cells infected with TNX-801, scHPXVΔ095^{yfp-gpt}, TNX-1800a-1, scHPXVΔ200^{yfp-gpt}, or TNX-1800b-2; FIG. 20B shows fold change from input in infected cells.

[0034] FIGS. 21A and 21B. Viral growth curves in BSC-40 cells infected with a synthetic vaccinia virus (VACV) over time. FIG. 21A shows viral titer (PFU/mL) measured in cells infected with TNX-1200, TNX-2200 or synVACVΔA2K105^{yfp-gpt}; FIG. 21B shows fold change from input in infected cells.

[0035] FIG. 22. Schematic representation of a linear dsDNA HPXV, showing the generation of a PCR fragment encoding a SARS-CoV-2 expression cassette. The expression cassette is introduced into the TK gene locus of the HPXV genome and comprises a DNA encoding the SARS-CoV2 Spike S gene protein that is operatively linked to a vaccinia virus early and late promoter inserted upstream of the SARS-CoV-2 Spike S DNA. The expression cassette further comprises a 1 kb HPXV left flanking arm (e.g., HPXV092, HPXV093 and HPXV094) and a 1 kb HPXV right flanking arm (e.g., HPXV096).

### DETAILED DESCRIPTION OF THE DISCLOSURE

### General Techniques

[0036] Unless otherwise defined herein, scientific and technical terms used in this application shall have the meanings that are commonly understood by those of ordinary skill in the art. Generally, nomenclature used in connection with, and techniques of, pharmacology, cell and tissue culture, molecular biology, cell and cancer biology, neurobiology, neurochemistry, virology, immunology, microbiology, genetics and protein and nucleic acid chemistry, described herein, are those well-known and commonly used in the art. In case of conflict, the present specification, including definitions, will control.

[0037] The practice of the present disclosure will employ, unless otherwise indicated, conventional techniques of molecular biology (including recombinant techniques), microbiology, cell biology, biochemistry, virology and immunology, which are within the skill of the art. Such techniques are explained fully in the literature, such as Molecular Cloning: A Laboratory Manual, second edition (Sambrook et al., 1989) Cold Spring Harbor Press; Oligonucleotide Synthesis (M. J. Gait, ed., 1984); Methods in Molecular Biology, Humana Press; Cell Biology: A Laboratory Notebook (J. E. Cellis, ed., 1998) Academic Press; Animal Cell Culture (R. I. Freshney, ed., 1987); Introduction to Cell and Tissue Culture (J. P. Mather and P. E. Roberts, 1998) Plenum Press; Cell and Tissue Culture: Laboratory Procedures (A. Doyle, J. B. Griffiths, and D. G. Newell, eds., 1993-1998) J. Wiley and Sons; Methods in Enzymology (Academic Press, Inc.); Gene Transfer Vectors for Mammalian Cells (J. M. Miller and M. P. Calos, eds., 1987); Current Protocols in Molecular Biology (F. M. Ausubel et al., eds., 1987); PCR: The Polymerase Chain Reaction, (Mullis et al., eds., 1994); Sambrook and Russell, Molecular Cloning: A Laboratory Manual, 3rd. ed., Cold Spring Harbor Laboratory Press, Cold Spring Harbor, N.Y. (2001); Ausubel et al., Current Protocols in Molecular Biology, John Wiley & Sons, N Y (2002); Harlow and Lane Using Antibodies: A Laboratory Manual, Cold Spring Harbor Laboratory Press, Cold Spring Harbor, N.Y. (1998); Coligan et al., Short Protocols in Protein Science, John Wiley & Sons, N Y (2003); Short Protocols in Molecular Biology (Wiley and Sons, 1999).

[0038] Enzymatic reactions and purification techniques are performed according to manufacturer's specifications, as commonly accomplished in the art or as described herein. The nomenclatures used in connection with, and the laboratory procedures and techniques of, analytical chemistry, biochemistry, immunology, molecular biology, synthetic organic chemistry, and medicinal and pharmaceutical chemistry described herein are those well-known and commonly used in the art. Standard techniques are used for chemical syntheses, and chemical analyses.

[0039] Throughout this specification and embodiments, the word “comprise,” or variations such as “comprises” or “comprising,” will be understood to imply the inclusion of a stated integer or group of integers but not the exclusion of any other integer or group of integers.

[0040] The term “including” is used to mean “including but not limited to.” “Including” and “including but not limited to” are used interchangeably.

[0041] Any example(s) following the term “e.g.” or “for example” is not meant to be exhaustive or limiting.

[0042] Unless otherwise required by context, singular terms shall include pluralities and plural terms shall include the singular.

[0043] The articles “a”, “an” and “the” are used herein to refer to one or to more than one (i.e., to at least one) of the grammatical object of the article. By way of example, “an element” means one element or more than one element. Reference to “about” a value or parameter herein includes (and describes) embodiments that are directed to that value or parameter per se. For example, description referring to “about X” includes description of “X.” Numeric ranges are inclusive of the numbers defining the range.

[0044] Notwithstanding that the numerical ranges and parameters setting forth the broad scope of the disclosure are approximations, the numerical values set forth in the specific examples are reported as precisely as possible. Any numerical value, however, inherently contains certain errors necessarily resulting from the standard deviation found in their respective testing measurements. Moreover, all ranges disclosed herein are to be understood to encompass any and all subranges subsumed therein. For example, a stated range of “1 to 10” should be considered to include any and all subranges between (and inclusive of) the minimum value of 1 and the maximum value of 10; that is, all subranges beginning with a minimum value of 1 or more, e.g., 1 to 6.1, and ending with a maximum value of 10 or less, e.g., 5.5 to 10.

[0045] Exemplary methods and materials are described herein, although methods and materials similar or equivalent to those described herein can also be used in the practice or testing of the present application. The materials, methods, and examples are illustrative only and not intended to be limiting.

### Definitions

[0046] The following terms, unless otherwise indicated, shall be understood to have the following meanings:

[0047] The terms “chimeric” or “engineered” or “modified” (e.g., chimeric poxvirus, engineered polypeptide, modified polypeptide, engineered nucleic acid, modified nucleic acid) or grammatical variations thereof are used interchangeably herein to refer to a non-native sequence that has been manipulated to have one or more changes relative a native sequence.

[0048] As used herein, the term “essential gene for replication” or “essential region for replication” refers to those gene(s) or region(s) indispensable for the replication of an organism, and therefore are considered a foundation of life. In the context of a virus, a gene or region is considered essential (i.e. has a role in cell culture) if its deletion results in a decrease in virus titer of greater than 10-fold in either a single or multiple step growth curve. Most of the essential genes are thought to encode proteins that maintain a central metabolism, replicate DNA, translate genes into proteins, maintain a basic cellular structure, and mediate transport processes into and out of the cell. Genes involved in virion production, actin tail formation, and extracellular virion release are typically also considered as essential. Two main strategies have been employed to identify essential genes on a genome-wide basis: directed deletion of genes and random mutagenesis using transposons. In the first case, individual genes (or ORFs) are completely deleted from the genome in a systematic way. In random mutagenesis, transposons are randomly inserted in as many positions in a genome as possible, aiming to inactivate the targeted genes. Insertion mutants that are still able to survive or grow are not in essential genes. (Zhang, R., 2009 & Gerdes, S., 2006).

[0049] The term “expression cassette” or “transcription unit”, as used herein, defines a nucleic acid sequence region that contains one or more genes to be transcribed. The nucleotide sequences encoding the to be transcribed gene(s), as well as the polynucleotide sequences containing the regulatory elements contained within an expression cassette, are operably linked to each other. The genes are transcribed from a promoter and transcription is terminated by at least one polyadenylation signal. In some embodiments, each of the one or more genes are transcribed from one promoter. In some embodiments, the one or more genes are transcribed from one single promoter. In that case, the different genes are at least transcriptionally linked. More than one protein or product can be transcribed and expressed from each transcription unit (multicistronic transcription unit). Each transcription unit will comprise the regulatory elements necessary for the transcription and translation of any of the selected sequences that are contained within the unit. Each transcription unit may contain the same or different regulatory elements.

[0050] “Homologous,” in all its grammatical forms and spelling variations, refers to the relationship between two proteins that possess a “common evolutionary origin,” including proteins from superfamilies in the same species of organism, as well as homologous proteins from different species of organism. Such proteins (and their encoding nucleic acids) have sequence homology, as reflected by their sequence similarity, whether in terms of percent identity or by the presence of specific residues or motifs and conserved positions. “Homologous” may also refer to a nucleic acid which is native to the virus.

[0051] In common usage and in the instant application, the term “homologous,” when modified with an adverb such as “highly,” may refer to sequence similarity and may or may not relate to a common evolutionary origin.

[0052] “Heterologous,” in all its grammatical forms and spelling variations, may refer to a nucleic acid which is non-native to the virus. It means derived from a different species or a different strain than the nucleic acid of the organism to which the nucleic acid is described as being heterologous relative to. In a non-limiting example, the viral genome of the synVACV comprises heterologous terminal hairpin loops. Those heterologous terminal hairpin loops can be derived from a different viral species or from a different VACV strain.

[0053] As used herein, a “host cell” includes an individual cell or cell culture that can be or has been a recipient for the virus of the disclosure. Host cells include progeny of a single host cell, and the progeny may not necessarily be completely identical (in morphology or in genomic DNA complement) to the original parent cell due to natural, accidental, or deliberate mutation. A host cell includes cells transfected and/or transformed in vivo with a poxvirus of this disclosure.

[0054] An “immunologically effective amount” refers to the amount to be administered of a composition of matter that comprises at least one antigen, or immunogenic portion thereof, which is able to elicit an immunological response in the host cell or an antibody-mediated immune response to the composition. An immunologically effective amount of a recombinant poxvirus, as disclosed herein, refers to the amount of poxviral particles necessary to deliver a SARS-CoV-2 virus protein and elicit an immune response against said SARS-CoV-2 virus protein. In some embodiments, an immunologically effective amount of the recombinant poxvirus of the present disclosure is an amount within the range of 10²-10⁹ PFU. In some embodiments, an immunologically effective amount of the recombinant poxvirus of the present disclosure is from about 10³-10⁵ PFU. In some embodiments, an immunologically effective amount of the recombinant poxvirus of the present disclosure is about 10⁵ PFU.

[0055] The terms “operative linkage” and “operatively linked” (or “operably linked”) or variations thereof, as used herein, are used interchangeably with reference to a juxtaposition of two or more components (such as sequence elements), in which the components are arranged such that both components function normally and allow the possibility that at least one of the components can mediate a function that is exerted upon at least one of the other components. By way of illustration, the nucleic acid encoding a SARS-CoV-2 virus protein may be operatively linked to a promoter. The nucleic acid sequence encoding a SARS-CoV-2 virus protein may be operatively linked in cis with a poxvirus specific promoter nucleic acid sequence, but does not need to be directly adjacent to it. For example, a linker sequence can be located between both sequences.

[0056] As used herein, the phrase “multiplicity of infection” or “MOI” is the average number of viruses per infected cell. The MOI is determined by dividing the number of virus added (ml added×plaque forming units (PFU)) by the number of cells added (ml added×cells/ml).

[0057] The terms “patient”, “subject”, or “individual” are used interchangeably herein and refer to either a human or a non-human animal. These terms include mammals, such as humans, primates, livestock animals (including bovines, porcines, camels, etc.), companion animals (e.g., canines, felines, etc.) and rodents (e.g., mice and rats).

[0058] As known in the art, “polynucleotide,” or “nucleic acid,” as used interchangeably herein, refer to chains of nucleotides of any length, and include DNA and RNA. The nucleotides can be deoxyribonucleotides, ribonucleotides, modified nucleotides or bases, and/or their analogs, or any substrate that can be incorporated into a chain by DNA or RNA polymerase. A polynucleotide may comprise modified nucleotides, such as methylated nucleotides and their analogs. If present, modification to the nucleotide structure may be imparted before or after assembly of the chain. The sequence of nucleotides may be interrupted by non-nucleotide components. A polynucleotide may be further modified after polymerization, such as by conjugation with a labeling component. Other types of modifications include, for example, “caps”, substitution of one or more of the naturally occurring nucleotides with an analog; internucleotide modifications such as, for example, those with uncharged linkages (e.g., methyl phosphonates, phosphotriesters, phosphoamidates, carbamates, etc.) and with charged linkages (e.g., phosphorothioates, phosphorodithioates, etc.); those containing pendant moieties, such as, for example, proteins (e.g., nucleases, toxins, antibodies, signal peptides, poly-L-lysine, etc.); those with intercalators (e.g., acridine, psoralen, etc.); those containing chelators (e.g., metals, radioactive metals, boron, oxidative metals, etc.); those containing alkylators; those with modified linkages (e.g., alpha anomeric nucleic acids, etc.); as well as unmodified forms of the polynucleotide(s). Further, any of the hydroxyl groups ordinarily present in the sugars may be replaced, for example, by phosphonate groups, phosphate groups, protected by standard protecting groups, or activated to prepare additional linkages to additional nucleotides, or may be conjugated to solid supports. The 5′ and 3′ terminal OH can be phosphorylated or substituted with amines or organic capping group moieties of from 1 to 20 carbon atoms. Other hydroxyls may also be derivatized to standard protecting groups. Polynucleotides can also contain analogous forms of ribose or deoxyribose sugars that are generally known in the art, including, for example, 2′-O-methyl-, 2′-O-allyl, 2′-fluoro- or 2′-azido-ribose, carbocyclic sugar analogs, alpha- or beta-anomeric sugars, epimeric sugars such as arabinose, xyloses or lyxoses, pyranose sugars, furanose sugars, sedoheptuloses, acyclic analogs and abasic nucleoside analogs such as methyl riboside. One or more phosphodiester linkages may be replaced by alternative linking groups. These alternative linking groups include, but are not limited to, embodiments wherein phosphate is replaced by P(O)S(“thioate”), P(S)S (“dithioate”), (O)NR₂ (“amidate”), P(O)R, P(O)OR′, CO or CH₂ (“formacetal”), in which each R or R′ is independently H or substituted or unsubstituted alkyl (1-20 C) optionally containing an ether and (—O—) linkage, aryl, alkenyl, cycloalkyl, cycloalkenyl or araldyl. Not all linkages in a polynucleotide need be identical. The preceding description applies to all polynucleotides referred to herein, including RNA and DNA.

[0059] The terms “polypeptide”, “oligopeptide”, “peptide” and “protein” are used interchangeably herein to refer to chains of amino acids of any length. The chain may be linear or branched, it may comprise modified amino acids, and/or may be interrupted by non-amino acids. The terms also encompass an amino acid chain that has been modified naturally or by intervention; for example, disulfide bond formation, glycosylation, lipidation, acetylation, phosphorylation, or any other manipulation or modification, such as conjugation with a labeling component. Also included within the definition are, for example, polypeptides containing one or more analogs of an amino acid (including, for example, unnatural amino acids, etc.), as well as other modifications known in the art. It is understood that the polypeptides can occur as single chains or associated chains.

[0060] “Percent (%) sequence identity” or “sequence % identical to” with respect to a reference polypeptide (or nucleotide) sequence is defined as the percentage of amino acid residues (or nucleic acids) in a candidate sequence that are identical with the amino acid residues (or nucleic acids) in the reference polypeptide (nucleotide) sequence, after aligning the sequences and introducing gaps, if necessary, to achieve the maximum percent sequence identity, and not considering any conservative substitutions as part of the sequence identity. Alignment for purposes of determining percent amino acid sequence identity can be achieved in various ways that are within the skill in the art, for instance, using publicly available computer software such as BLAST, BLAST-2, ALIGN or Megalign (DNASTAR) software. Those skilled in the art can determine appropriate parameters for aligning sequences, including any algorithms needed to achieve maximal alignment over the full length of the sequences being compared.

[0061] As outlined elsewhere herein, certain positions of the viral genome can be altered. By “position” as used herein is meant a location in the genome sequence. Corresponding positions are generally determined through alignment with other parent sequences.

[0062] As used herein, “purify,” and grammatical variations thereof, refers to the removal, whether completely or partially, of at least one impurity from a mixture containing the polypeptide and one or more impurities, which thereby improves the level of purity of the polypeptide in the composition (i.e., by decreasing the amount (ppm) of impurity(ies) in the composition). As used herein “purified” in the context of viruses refers to a virus which is substantially free of cellular material and culture media from the cell or tissue source from which the virus is derived. The language “substantially free of cellular material” includes preparations of virus in which the virus is separated from cellular components of the cells from which it is isolated or recombinantly produced. Thus, a virus that is substantially free of cellular material includes preparations of protein having less than about 30%, 20%, 10%, or 5% (by dry weight) of cellular protein (also referred to herein as a “contaminating protein”). The virus may also be substantially free of culture medium, i.e., culture medium represents less than about 20%, 10%, or 5% of the volume of the virus preparation. A virus can be “purified” using routine methods known to one of skill in the art including, but not limited to, chromatography and centrifugation.

[0063] As used herein, the term “recombinant poxvirus” refers to a poxvirus comprising an exogenous or heterologous sequence in its genome generated by artificial manipulation of the viral genome, i.e. generation by recombinant DNA technology. The recombinant poxvirus contains an exogenous polynucleotide sequence encoding a polypeptide of interest. In some embodiments, the recombinant poxvirus comprises a nucleic acid encoding a SARS-CoV-2 virus protein.

[0064] As used herein, the term “rescue poxvirus” or “rescue virus” or “rescue system” refers to a virus or system which relies on a helper virus to provide the machinery necessary to produce recombinant viruses, by assembling the fragmented genome, while simultaneously integrating the targeted gene or expression cassette. Rice et al. Viruses. 2011 March; 3(3): 217-232.

[0065] As used herein, the term “residue” in the context of a polypeptide refers to an amino-acid unit in the linear polypeptide chain. It is what remains of each amino acid, i.e. —NH—CHR—C—, after water is removed in the formation of the polypeptide from α-amino-acids, i.e. NH2-CHR—COOH.

[0066] The term “sequence similarity,” in all its grammatical forms, refers to the degree of identity or correspondence between nucleic acid or amino acid sequences that may or may not share a common evolutionary origin.

[0067] As used herein, “synthetic virus” refers to a virus initially derived from synthetic DNA (e.g., chemically synthesized DNA, PCR amplified DNA, engineered DNA, polynucleotides comprising nucleoside analogs, etc., or combinations thereof) and includes its progeny, and the progeny may not necessarily be completely identical (in morphology or in genomic DNA complement) to the original parent synthetic virus due to natural, accidental, or deliberate mutation. In some embodiments, the synthetic virus refers to a virus where substantially all of the viral genome is initially derived from synthetic DNA (e.g., chemically synthesized DNA, PCR amplified DNA, engineered DNA, polynucleotides comprising nucleoside analogs, etc., or combinations thereof). In a preferred embodiment, the synthetic virus is derived from chemically synthesized DNA.

[0068] As used herein, “substantially pure” refers to material which is at least 50% pure (i.e., free from contaminants), more preferably, at least 90% pure, more preferably, at least 95% pure, yet more preferably, at least 98% pure, and most preferably, at least 99% pure.

[0069] The term “vaccine”, as used herein, refers to a composition comprising at least one immunologically active component that induces an immunological response in an animal and possibly, but not necessarily, one or more additional components that enhance the immunological activity of the active component. A vaccine may additionally comprise further components typical to pharmaceutical compositions. The immunologically active component of a vaccine may comprise complete virus particles in either their original form or as attenuated particles (modified live vaccine), or particles inactivated by appropriate methods (killed or inactivated vaccine). In other embodiments, the immunologically active component of a vaccine may comprise appropriate elements of the organisms (subunit vaccines) that best stimulate the immune system. The immunologically active component may be a protein of the viral envelope. The immunologically active component may be a protein forming part of the nucleocapsid. In some embodiments, the immunologically active component of a vaccine against SARS-CoV-2 is an envelope protein. Non-limiting examples of such proteins are the Spike protein (S), the Membrane protein (M) and the Hemagglutinin-Esterase protein (HE). In some embodiments, the immunologically active component of a vaccine against SARS-CoV-2 is the nucleocapsid protein (N).

[0070] The term “viral vector”, as used herein, describes a genetically modified virus which was manipulated by a recombinant DNA technique in a way so that its entry into a host cell is capable of resulting in a specific biological activity, e.g. the expression of a foreign target gene carried by the vector. A viral vector may or may not be replication competent in the target cell, tissue, or organism. A viral vector can incorporate sequences from the genome of any known organism. The sequences can be incorporated in their native form or can be modified in any way to obtain a desired activity. For example, the sequences can comprise insertions, deletions or substitutions. A viral vector can also incorporate an insertion site for an exogenous polynucleotide sequence. In some embodiments, the viral vector is a poxvirus. In some embodiments, the viral vector is a horsepox viral vector. In some embodiments, the viral vector is a synthetic horsepox viral vector.

[0071] As used herein, the terms “wild type virus”, “wild type genome”, “wild type protein,” or “wild type nucleic acid” refer to a sequence of amino or nucleic acids that occurs naturally within a certain population (e.g., a particular viral species, etc.).

[0072] Each embodiment described herein may be used individually or in combination with any other embodiment described herein.

### Overview

[0073] Poxviruses are large (˜200 kbp) DNA viruses that replicate in the cytoplasm of infected cells. The Orthopoxvirus (OPV) genus comprises a number of poxviruses that vary greatly in their ability to infect different hosts. Vaccinia virus (VACV), for example, can infect a broad group of hosts, whereas variola virus (VARV), the causative agent of smallpox, only infects humans. A feature common to many, if not all poxviruses, is their ability to non-genetically “reactivate” within a host. Non-genetic reactivation refers to a process wherein cells infected by one poxvirus can promote the recovery of a second “dead” virus (for example one inactivated by heat) that would be non-infectious on its own.

[0074] Purified poxvirus DNA is not infectious because the virus life cycle requires transcription of early genes via the virus-encoded RNA polymerases that are packaged in virions. However, this deficiency can be overcome if virus DNA is transfected into cells previously or subsequently infected with a helper poxvirus, providing the necessary factors needed to transcribe, replicate, and package the transfected genome in trans (Sam C K, Dumbell K R. Expression of poxvirus DNA in coinfected cells and marker rescue of thermosensitive mutants by subgenomic fragments of DNA. Ann Virol (Inst Past). 1981; 132:135-50). Although this produces mixed viral progeny, a desired virus can be obtained by performing a reactivation reaction in a cell line that supports the propagation of both viruses, and then eliminating the helper virus by plating the mixture of viruses on cells that do not support the helper virus' growth (Scheiflinger F, Dorner F, Falkner F G. Construction of chimeric vaccinia viruses by molecular cloning and packaging. Proceedings of the National Academy of Sciences of the United States of America. 1992; 89(21):9977-81).

### Preparation of Poxviruses

[0075] Any of the synthetic poxviruses disclosed in US 2018/0251736 and WO 2019/213452, the entire disclosure of each is incorporated by reference herein, may be used in the present disclosure.

[0076] In one aspect, the present disclosure provides recombinant poxviruses comprising a nucleic acid encoding a SARS-CoV-2 virus protein, wherein the SARS-CoV-2 protein is selected from the group consisting of the spike protein (S), the membrane protein (M) and the nucleocapsid protein (N), or combinations of two or more of said proteins.

[0077] In some embodiments, the poxvirus belongs to the Chordopoxvirinae subfamily. In some embodiments, the poxvirus belongs to a genus of Chordopoxvirinae subfamily selected from Avipoxvirus, Capripoxvirus, Cervidpoxvirus, Crocodylipoxvirus, Leporipoxvirus, Molluscipoxvirus, Orthopoxvirus, Parapoxvirus, Suipoxvirus, or Yatapoxvirus. In some embodiments, the recombinant poxvirus is an Orthopoxvirus. In some embodiments, the Orthopoxvirus is selected from the group consisting of camelpox virus (CMLV), cowpox virus (CPXV), ectromelia virus (ECTV, “mousepox agent”), horsepox virus (HPXV), monkeypox virus (MPXV), rabbitpox virus (RPXV), raccoonpox virus, skunkpox virus, Taterapox virus, Uasin Gishu disease virus, vaccinia virus (VACV), variola virus (VARV) and volepox virus (VPV). In some embodiments, the poxvirus is a Parapoxvirus. In some embodiments, the Parapoxvirus is selected from orf virus (ORFV), pseudocowpox virus (PCPV), bovine popular stomatitis virus (BPSV), squirrel parapoxvirus (SPPV), red deer parapoxvirus, Ausdyk virus, Chamois contagious ecythema virus, reindeer parapoxvirus, or sealpox virus. In some embodiments, the poxvirus is a Molluscipoxvirus. In some embodiments, the Molluscipoxvirus is molluscum contagiousum virus (MCV). In some embodiments, the poxvirus is a Yatapoxvirus. In some embodiments, the Yatapoxvirus is selected from Tanapox virus or Yaba monkey tumor virus (YMTV). In some embodiments, the poxvirus is a Capripoxvirus. In some embodiments, the Capripoxvirus is selected from sheepox, goatpox, or lumpy skin disease virus. In some embodiments, the poxvirus is a Suipoxvirus. In some embodiments, the Suipoxvirus is swinepox virus. In some embodiments, the poxvirus is a Leporipoxvirus. In some embodiments, the Leporipoxvirus is selected from myxoma virus, Shope fibroma virus (SFV), squirrel fibroma virus, or hare fibroma virus. In some embodiments, the poxvirus is an HPXV. In some embodiments, the horsepox virus is strain MNR-76. In other embodiments, the poxvirus is a VACV. In some embodiments, the VACV is selected from the group of strains consisting of: Western Reserve, Western Reserve Clone 3, Tian Tian, Tian Tian clone TP5, Tian Tian clone TP3, NYCBH, NYCBH clone Acambis 2000, Wyeth, Copenhagen, Lister, Lister 107, Lister-LO, Lister GL-ONC1, Lister GL-ONC2, Lister GL-ONC3, Lister GL-ONC4, Lister CTC1, Lister IMG2 (Turbo FP635), IHD-W, LC16m18, Lederle, Tashkent clone TKT3, Tashkent clone TKT4, USSR, Evans, Praha, L-IVP, V-VET1 or LIVP 6.1.1, Ikeda, EM-63, Malbran, Duke, 3737, CV-1, Connaught Laboratories, Serro 2, CM-01, NYCBH Dryvax clone DPP13, NYCBH Dryvax clone DPP15, NYCBH Dryvax clone DPP20, NYCBH Dryvax clone DPP17, NYCBH Dryvax clone DPP21, VACV-IOC, Chorioallantoid Vaccinia virus Ankara (CVA), Modified vaccinia Ankara (MVA), and MVA-BN. New poxviruses (e.g. Orthopoxviruses) are still being constantly discovered. It is understood that a poxvirus of the disclosure may be based on such a newly discovered poxvirus.

[0078] Chemical viral genome synthesis opens up the possibility of introducing a large number of useful modifications to the resulting genome or to specific parts of it. The modifications may improve ease of cloning to generate the virus, provide sites for introduction of recombinant gene products, improve ease of identifying reactivated viral clones and/or confer a plethora of other useful features (e.g. introducing a desired antigen, producing an oncolytic virus, etc.). In some embodiments, the modifications may include the attenuation or deletion of one or more virulence factors. In some embodiments, the modifications may include the addition or insertion of one or more virulence regulatory genes or gene-encoding regulatory factors.

[0079] Traditionally, the terminal hairpins of poxviruses have been difficult to clone and to sequence. As a result, some of the published genome sequences (e.g., VACV, ACAM 2000 and HPXV MNR-76) are incomplete. The published sequence of the HPXV genome is likewise incomplete, probably missing ˜60 bp from the terminal ends. In an exemplary embodiment, 129 nt ssDNA fragments were chemically synthesized using the published sequence of the VACV terminal hairpins as a guide and ligated onto dsDNA fragments comprising left and right ends of the HPXV genome. In some embodiments, the terminal hairpins of the poxvirus of the disclosure are derived from VACV. In some embodiments, the terminal hairpins are derived from CMLV, CPXV, ECTV, HPXV, MPXV, RPXV, raccoonpox virus, skunkpox virus, Taterapox virus, Uasin Gishu disease virus or VPV. In some embodiments, the terminal hairpins are based on the terminal hairpins of any poxvirus whose genome has been completely sequenced or a natural isolate of which is available for genome sequencing. In some embodiments, the poxviruses are synthetic versions of HPXV comprising the terminal hairpins of VACV (GenBank accession number KY349117; see US 2018/0251736, incorporated by reference herein).

[0080] In some embodiments, the modifications introduced in a poxvirus genome may include the deletion of one or more restriction sites. In some embodiments, the modifications may include the introduction of one or more restriction sites. In some embodiments, the restriction sites to be deleted from the genome or added to the genome may be selected from one or more of restriction sites such as but not limited to AanI, AarI, AasI, AatI, AatII, AbaSI, AbsI, Acc65I, AccI, AccII, AccIII, AciI, AcII, AcuI, AfeI, AflII, AflIII, AgeI, AhdI, AleI, AluI, AlwI, AlwNI, ApaI, ApaLI, ApeKI, ApoI, AscI, AseI, AsiSI, AvaI, AvaII, AvrII, BaeGI, BaeI, BamHI BanI, BanII, BbsI, BbvCI, BbvI, BccI, BceAI, BcgI, BciVI, BclI, BcoDI, BfaI, BfuAI, BfuCI, BglI, BglII, BlpI, BmgBI, BmrI, BmtI, BpmI, Bpu10I, BpuEI, BsaAI, BsaBI, BsaHI, BsaI, BsaXI, BsaWI, BsaXI, BseRI, BseYI, BsgI, BsiEI, BsiHKAI, BsiWI, BslI, BsmAI, BsmBI, BsmFI, BsmI, BsoBI, Bsp1286I, BspCNI, BspDI, BspEI, BspHI, BspMI, BspQI, BsrBI, BsrDI, BsrFαI, BsrGI, BsrI, BssHII, BssSαI, BstAPI, BstBI, BstEII, BstNI, BstUI, BstXI, BstYI, BstZ171, Bsu36I, BtgI, BtgZI, BtsαI, BtsCI, BtsIMutI, Cac8I, ClaI, CspCI, CviAII, CviKI-1, CviQI, DdeI, DpnI, DpnII, DraI, DrdI, EaeI, EagI, EarI, EciI, Eco53kI, EcoNI, EcoO1091, EcoP15I, EcoRI, EcoRV, FatI, FauI, Fnu4HI, FokI, FseI, FspEI, FspI, HaeII, HaeIII, HgaI, HhaI, HincII, HindIII, HinfI, HinP1I, HpaI, HpaII, HphI, Hpy166II, Hpy188I, Hpy188III, Hpy99I, HpyAV, HpyCH4III, HpyCH4IV, HpyCH4V, I-CeuI, I-SceI, KasI, KpnI, LpnPI, MboI, MboII, MfeI, MluCI, MluI, MlyI, MmeI, MnlI, MscI, MseI, MslI, MspA1I, MspI, MspJI, MwoI, NaeI, NarI, NciI, NcoI, NdeI, NgoMIV, NheI, NlaIII, NlaIV, NmeAIII, NotI, NruI, NsiI, NspI, PacI, PaeR7I, PciI, PflFI, PflMI, PleI, PluTI, PmeI, PmII, PpuMI, PshAI, PsiI, PspGI, PspOMI, PspXI, PstI, PvuI, PvuII, RsaI, RsnII, SacI, SacII, SalI, SapI, Sau3AI, Sau96I, SbfI, ScrFI, SexAI, SfaNI, SfcI, SfiI, SfoI, SgrAI, SmaI, SmII, SnaBI, SpeI, SphI, SrfI, SspI, StuI, StyD4I, StyI, SwaI, TaqαI, TfiI, TseI, Tsp45I, TspMI, TspRI, Tth111I, XbaI, XcmI, XhoI, XmaI, XmnI, or ZraI. It is understood that any desired restriction site(s) or combination of restriction sites may be inserted into the genome or mutated and/or eliminated from the genome. In some embodiments, one or more AarI sites are deleted from the viral genome. In some embodiments, one or more BsaI sites are deleted from the viral genome. In some embodiments, one or more restriction sites are completely eliminated from the genome (e.g. all the AarI sites in the viral genome may be eliminated). In some embodiments, one or more AvaI restriction sites are introduced into the viral genome. In some embodiments, one or more StuI sites are introduced into the viral genome. In some embodiments, the one or more modifications may include the incorporation of recombineering targets including but not limited to loxP or FRT sites.

[0081] In some embodiments, the poxvirus modifications may include the introduction of fluorescence markers such as but not limited to green fluorescent protein (GFP), enhanced GFP, yellow fluorescent protein (YFP), cyan/blue fluorescent protein (BFP), red fluorescent protein (RFP), or variants thereof, etc.; selectable markers such as but not limited to drug resistance markers (e.g. E. coli xanthine-guanine phosphoribosyl transferase gene (gpt), Streptomyces alboniger puromycin acetyltransferase gene (pac), neomycin phosphotransferase I gene (nptI), neomycin phosphotransferase gene II (nptII), hygromycin phosphotransferase (hpt), sh ble gene, etc.; protein or peptide tags such as but not limited to MBP (maltose-binding protein), CBD (cellulose-binding domain), GST (glutathione-S-transferase), poly(His), FLAG, V5, c-Myc, HA (hemagglutinin), NE-tag, CAT (chloramphenicol acetyl transferase), DHFR (dihydrofolate reductase), HSV (Herpes simplex virus), VSV-G (Vesicular stomatitis virus glycoprotein), luciferase, protein A, protein G, streptavidin, T7, thioredoxin, Yeast 2-hybrid tags such as B42, GAL4, LexA, or VP16; localization tags such as an NLS-tag, SNAP-tag, Myr-tag, etc. It is understood that other selectable markers and/or tags known in the art may be used. In some embodiments, the modifications include one or more selectable markers to aid in the selection of reactivated clones (e.g. a fluorescence marker such as YFP, a drug selection marker such as gpt, etc.) to aid in the selection of reactivated viral clones. In some embodiments, the one or more selectable markers are deleted from the reactivated clones after the selection step.

[0082] In some embodiments, the poxviruses are synthetic horsepox viruses (scHPXV). In some embodiments, the synthetic horsepox viruses have been produced by recombination of overlapping DNA fragments of the viral genome and reactivation of the functional poxvirus is carried out in cells previously infected with a helper virus. Briefly, overlapping DNA fragments that encompass all or substantially all of the viral genome of the horsepox are chemically synthesized and transfected into helper virus-infected cells. The transfected cells are cultured to produce mixed viral progeny comprising the helper virus and reactivated horsepox virus. Next, the mixed viral progeny is plated on host cells that do not support the growth of the helper virus but allow the synthetic poxvirus to grow, in order to eliminate the helper virus and recover the synthetic poxviruses.

[0083] In some embodiments, substantially all of the synthetic poxviral genome is derived from chemically synthesized DNA. In some embodiments, about 40%, about 50%, about 60%, about 70%, about 75%, about 80%, about 85%, about 90%, about 95%, about 96%, about 97%, about 98%, about 99%, over 99%, or 100% of the synthetic poxviral genome is derived from chemically synthesized DNA. In some embodiments, the poxviral genome is derived from a combination of chemically synthesized DNA and naturally occurring DNA.

[0084] The number of overlapping DNA fragments used to generate the synthetic poxvirus will depend on the size of the poxviral genome. Practical considerations such as reduction in recombination efficiency as the number of fragments increases on the one hand and difficulties in synthesizing very large DNA fragments as the number of fragments decreases on the other hand will also inform the number of overlapping fragments used. In some embodiments, the synthetic poxviral genome may be synthesized as a single fragment. In some embodiments, the synthetic poxviral genome is assembled from 2-14 overlapping DNA fragments. In some embodiments, the synthetic poxviral genome is assembled from 4-12 overlapping DNA fragments. In some embodiments, the synthetic poxviral genome is assembled from 6-10 overlapping DNA fragments. In some embodiments, the synthetic poxviral genome is assembled from 8-12 overlapping DNA fragments. In some embodiments, the synthetic poxviral genome is assembled from 10 overlapping DNA fragments. In an exemplary embodiment of the disclosure, a synthetic horsepox virus (scHPXV) is reactivated from 10 chemically synthesized overlapping double-stranded DNA fragments. In some embodiments, all of the fragments encompassing the poxviral genome are chemically synthesized. In some embodiments, one or more of the fragments are chemically synthesized and one or more of the fragments are derived from naturally occurring DNA (e.g. by PCR amplification or by well-established recombinant DNA techniques).

[0085] In some embodiments, the terminal hairpin loops are synthesized separately and ligated onto the fragments comprising the left and right ends of the poxviral genome. In some embodiments, terminal hairpin loops may be derived from a naturally occurring template. In some embodiments, the terminal hairpins of the synthetic poxvirus are derived from VACV. In some embodiments, the terminal hairpins of the recombinant synthetic poxvirus are derived from CMLV, CPXV, ECTV, HPXV, MPXV, RPXV, raccoonpox virus, skunkpox virus, Taterapox virus, Uasin Gishu disease virus or VPV. In some embodiments, the terminal hairpins of the recombinant scHPXV are derived from VACV. In some embodiments, the terminal hairpins of the recombinant scHPXV are derived from CMLV, CPXV, ECTV, HPXV, MPXV, RPXV, raccoonpox virus, skunkpox virus, Taterapox virus, Uasin Gishu disease virus or VPV. In some embodiments, the terminal hairpins of the poxvirus are based on the terminal hairpins of any poxvirus whose genome has been completely sequenced or a natural isolate of which is available for genome sequencing.

[0086] The size of the overlapping fragments used to generate the poxvirus of the disclosure will depend on the size of the poxviral genome. It is understood that there can be wide variations in fragment sizes and various practical considerations such as the ability to chemically synthesize very large DNA fragments, will inform the choice of fragment sizes. In some embodiments, the fragments range in size is from about 2000 bp to about 50000 bp. In some embodiments, the fragments range in size is from about 3000 bp to about 45000 bp. In some embodiments, the fragments range in size is from about 4000 bp to 40000 bp. In some embodiments, the fragments range in size is from about 5000 bp to 35000 bp. In some embodiments, the largest fragments are about 20000 bp, 21000 bp, 22000 bp, 23000 bp, 24 000 bp, 25000 bp, 26000 bp, 27000 bp, 28000 bp, 29000 bp, 30000 bp, 31000 bp, 32000 bp, 33000 bp, 34000 bp, 35000 bp, 36000 bp, 37000 bp, 38000 bp, 39000 bp, 40000 bp, 41000 bp, 42000 bp, 43000 bp, 44000 bp, 45000 bp, 46000 bp, 47000 bp, 48000 bp, 49000 bp, or 50000 bp. In some embodiments, a scHPXV is reactivated from 10 chemically synthesized overlapping double-stranded DNA fragments ranging in size from about 8500 bp to about 32000 bp (Table 2).

[0087] The poxviruses of the present disclosure can be propagated in any substrate that allows the virus to grow to titers that permit the uses of the recombinant poxvirus described herein. The poxvirus of the present disclosure may be grown in cells (e.g. avian cells, bat cells, bovine cells, camel cells, canary cells, cat cells, deer cells, equine cells, fowl cells, gerbil cells, goat cells, human cells, monkey cells, pig cells, rabbit cells, raccoon cells, seal cells, sheep cells, skunk cells, vole cells, etc.) that are susceptible to infection by the poxviruses. In some embodiments, the poxvirus is grown in adherent cells. In some embodiments, the poxvirus is grown in suspension cells. In some embodiments, the poxvirus is grown in mammalian cells. Such methods are well-known to those skilled in the art. Representative mammalian cells include, but are not limited to, BHK, MRC, BGMK, BRL3A, BSC-40, CEF, CEK, CHO, COS, CVI, HaCaT, HEL, HeLa cells, HEK293, human bone osteosarcoma cell line 143B, MDCK, NIH/3T3, Vero cells, etc. For virus isolation, the recombinant poxvirus is removed from cell culture and separated from cellular components, typically by well-known clarification procedures, e.g., such as gradient centrifugation and column chromatography, and may be further purified as desired using procedures well known to those skilled in the art, e.g., plaque assays. In some embodiments, the poxvirus is grown in Vero cells. In some embodiments, the poxvirus is grown in ACE2 Knockout Vero cells. In some embodiments, the poxvirus is grown in Vero adherent cells. In other embodiments, the poxvirus is grown in Vero suspension cells. In some embodiments, the poxvirus is grown in BSC-40 cells. In some embodiments, the poxvirus is grown in BHK-21 cells. In some embodiments, the poxvirus is grown in MRC-5 cells. In some embodiments, the poxvirus is grown in MRC-5 cells in the presence of for example, 5% serum, including but not limited to fetal calf serum. In some embodiments, the poxvirus is grown in avian cells. Such methods are well-known to those skilled in the art. Representative avian cells include, but are not limited to, chicken embryo fibroblasts, DF-1 cells (see, e.g., Himly et al., Virology, (1998) 248:295-304), duck embryo-derived cells, EB66® cells (see, e.g., Leon et al. Vaccine, (2016) 34: 5878-5885), AGE1. CR cells, including but not limited to AGE1.CRpIX® cells, DF-1 cells (see, e.g., Lohr et al., Vaccine, (2009) 36:4975-4982), etc. In some embodiments, the poxvirus is grown in chicken embryo fibroblasts. In some embodiments, the poxvirus is grown in duck embryo-derived cells. In some embodiments, the poxvirus is grown in EB66® cells. In some embodiments, the poxvirus is grown in AGE1.CRpIX® cells. In some embodiments, the poxvirus is grown in DF-1 cells.

[0088] In some embodiments, the method of producing a synthetic poxvirus comprises a step of chemically synthesizing overlapping DNA fragments that correspond to substantially all of the viral genome of the poxvirus and, optionally, chemically synthesizing the terminal hairpin loops from another virus or from another strain of virus; (ii) transfecting the overlapping DNA fragments into helper virus-infected cells; (iii) culturing said cells to produce a mixture of helper virus and synthetic poxvirus particles in said cells; and (iv) plating the mixture on host cells specific to the poxvirus to recover the synthetic poxvirus.

[0089] In some embodiments, the method of producing a synthetic horsepox virus comprises a step of (i) chemically synthesizing overlapping DNA fragments that correspond to substantially all of the viral genome of the horsepox virus and chemically synthesizing the terminal hairpin loops from another poxvirus (such as VACV, strain WB or NYCBH clone ACAM 2000); (ii) transfecting the overlapping DNA fragments into helper virus-infected cells; (iii) culturing said cells to produce a mixture of helper virus and synthetic horsepox virus particles in said cells; and (iv) plating the mixture on host cells specific to the horsepox virus to recover the synthetic horsepox virus.

[0090] In some embodiments, the poxvirus is a synthetic horsepox virus. In some embodiments, the synthetic horsepox virus genome is based on the published genome sequence described for horsepox virus (GenBank accession DQ792504) and the terminal hairpins are based on the published genome sequence similar to VACV strain NYCBH clone ACAM2000 (GenBank accession MN974380). In some embodiments, the synthetic horsepox virus comprises the sequence deposited in GenBank as accession number KY349117; see US 2018/0251736, incorporated by reference herein. In some embodiments, the synthetic horsepox virus is characterized by a nucleic acid encoding a SARS-CoV-2 virus S protein comprises the sequence set forth in SEQ ID NO: 43.

[0091] In some embodiments, the poxvirus is a synthetic recombinant vaccinia virus (synVACV). In some embodiments, the synthetic vaccinia genome is based on the published genome sequence described for VACV strain NYCBH clone ACAM2000 (GenBank accession AY313847; Osborne J D et al. Vaccine. 2007; 25(52):8807-32). In some embodiments, the synthetic vaccinia genome is based on the published genome sequence similar to VACV strain NYCBH clone ACAM2000 (GenBank accession MN974380; see WO 2019/213452, incorporated by reference herein). In some embodiments, the synthetic vaccinia virus comprises the sequence deposited in GenBank as accession number MN974381 (see WO 2019/213452, incorporated by reference herein). In some embodiments, the synthetic vaccinia virus is characterized by a nucleic acid encoding a SARS-CoV-2 virus S protein comprises the sequence set forth in SEQ ID NO: 44.

### Generation of the Recombinant Poxvirus Comprising a SARS-CoV-2 Protein

[0092] Any of the synthetic poxviruses disclosed in US 2018/0251736 and WO 2019/213452, may be used to generate a recombinant poxvirus comprising a SARS-CoV-2 protein, as disclosed herein.

[0093] In one aspect, the present disclosure relates to a recombinant poxvirus comprising a nucleic acid encoding a SARS-CoV-2 virus protein, wherein the SARS-CoV-2 protein is selected from the group consisting of the spike protein (S), the membrane protein (M) and the nucleocapsid protein (N), or combinations of two or more of said proteins. In some embodiments, the nucleotide sequence of the SARS-CoV-2 virus is any one of the published genome sequences, including, but not limited, to the genome sequences of the Wuhan strain, the UK strain B.1.1.7 strain, the South African B. 1.351 strain, the Brazilian B.1.1.28 strain, other emerging variants and any of their variants. In some embodiments, the nucleotide sequence of the SARS-CoV-2 virus is selected from the group consisting of GenBank accession numbers NC045512.2, LC521925.1, MN988668.1, MN985325.1, MN975262.1, MN938384.1, LR757998.1, LR757996.1, LR757995.1 and MN908947.3. In some embodiments, the nucleotide sequence of the SARS-CoV-2 virus is characterized by the sequence set forth in GenBank Accession Number MN988668.1; SEQ ID NO: 46. In some embodiments, the nucleotide sequence of the SARS-CoV-2 virus is further selected from the group consisting of GenBank accession numbers QQX99439 (e.g., B.1.1.7 United Kingdom variant), TEGALLY (e.g., B.1.351 South Africa variant), YP_009724390 (e.g., a Wuhan variant), and FARIA (e.g., B.1.1.28 Brazil variant).

[0094] The viral envelope of the SARS-CoV-2 virus is covered by characteristic spike-shaped glycoproteins (S) as well as the envelope (E) and membrane (M) proteins. The S protein mediates host cell attachment and entry. The helical nucleocapsid, comprised of the viral genome encapsidated by the nucleocapsid protein (N), resides within the viral envelope. In some embodiments, the poxvirus or synthetic poxvirus comprises a nucleic acid encoding a SARS-CoV-2 envelope protein. Non-limiting examples of such proteins are the Spike protein (S), the Membrane protein (M) and the Hemagglutinin-Esterase protein (HE). In some embodiments, the poxviruses or synthetic poxviruses comprise a nucleic acid encoding the S protein (SEQ ID NO: 9). In some embodiments, the poxviruses or synthetic poxviruses comprise a nucleic acid encoding the S protein (SEQ ID NO: 47). In some embodiments, the poxviruses or synthetic poxviruses comprise a nucleic acid encoding the M protein (SEQ ID NO: 10). In some embodiments, the poxviruses or synthetic poxviruses comprise a nucleic acid encoding the M protein (SEQ ID NO: 48). In some embodiments, the poxviruses or synthetic poxviruses comprise a nucleic acid encoding the N protein (SEQ ID NO: 11). In some embodiments, the poxviruses or synthetic poxviruses comprise a nucleic acid encoding the N protein (SEQ ID NO: 49). In some embodiments, the poxviruses or synthetic poxviruses comprise a nucleic acid encoding the HE protein (protein E or HE of Wuhan-HU-1, Accession LC521925.1; SEQ ID NO: 12). In some embodiments, the poxviruses or synthetic poxviruses comprise a combination of S protein and M protein. In some embodiments, the poxviruses or synthetic poxviruses comprise a combination of S protein and N protein. In some embodiments, the poxviruses or synthetic poxviruses comprises a combination of M protein and N protein.

[0095] In some embodiments, the SARS-CoV-2 virus is a Wuhan seafood market pneumonia virus 2019-nCoV isolate. GenBank accession number LC521925.1; SEQ ID NO: 13. In some embodiments, the SARS-CoV-2 virus is a Wuhan seafood market pneumonia virus 2019-nCoV isolate. GenBank accession number MN988668.1; SEQ ID NO: 46.

[0096] In some embodiments, the amino acid sequence of the SARS-CoV-2 virus protein is modified with reference to a wild type protein.

[0097] In some embodiments, the nucleotide sequence encoding the S protein is modified with reference to a wild type nucleotide sequence. In some embodiments, the amino acid sequence of the S protein is modified with reference to the wild type protein (protein S of Wuhan-HU-1, Accession LC521925.1; SEQ ID NO: 9). In some embodiments, the amino acid sequence of the S protein is modified with reference to the wild type protein (protein S of Wuhan-HU-1, Accession MN988668.1; SEQ ID NO: 47). In some embodiments, the amino acid sequence of the S protein is modified with reference to the wild type protein (protein S of Wuhan-Hu-1, Accession NC_045512.2; SEQ ID NO: 53) In some embodiments, the amino acid sequence of the SARS-CoV-2 virus protein is modified with reference to a wild type protein, so that the modified protein is adapted to infect mice. See Roberts et al. PLoS Pathog 3(1): e5. doi:10.1371; incorporated herein by reference in its entirety. In some embodiments, Tyrosine at position 459 is substituted by Histidine (Y459H) in the S protein with reference to the wild type protein (SEQ ID NO: 47). In some embodiments, the S protein comprises one or more mutations that enable antibody-dependent enhancement. In some embodiments, Aspartic acid at position 614 is substituted by Glycine (D614G) in the S protein with reference to the wild type protein (SEQ ID NO: 47). See Korber et al. bioRxiv 2020.04.29.069054; incorporated herein by reference in its entirety. In some embodiments, the S protein comprises one or more mutations in the fusion core of the HR1 region. In some embodiments, Serine at position 943 is substituted by Proline (S943P) in the S protein with reference to the wild type protein (SEQ ID NO: 47). In some embodiments, the S protein comprises one or more mutations that stabilize the S protein in an antigenically optimal prefusion conformation, which results in increased expression, conformational homogeneity and elicitation of potent antibody responses. In some embodiments, the mutations that stabilize the S protein in the prefusion conformation are located at the beginning of the central helix. See Pallesen et al. Proc Natl Acad Sci USA. 2017; 114(35); incorporated herein by reference in its entirety. In some embodiments, Lysine at position 986 is substituted by Proline (K986P) in the S protein with reference to the wild type protein (SEQ ID NO: 47). In some embodiments, Valine at position 987 is substituted by Proline (V987P) in the S protein with reference to the wild type protein (SEQ ID NO: 47). In some embodiments, the S protein comprises any one of substitutions Y459H, D614G, S943P, K986P and V987P, or a combination thereof, with reference to the wild type protein (SEQ ID NO: 47).

[0098] In some embodiments, the amino acid sequence of the M protein is modified with reference to the wild type protein (protein M of Wuhan-HU-1, Accession LC521925.1; SEQ ID NO: 10). In some embodiments, the amino acid sequence of the M protein is modified with reference to the wild type protein (protein M of Wuhan-HU-1, Accession MN988668.1; SEQ ID NO: 48). In some embodiments, Glutamic acid at position 11 is substituted by a Lysine in the M protein with reference to the wild type protein. In some embodiments, Glutamic acid at position 11 is substituted by a Lysine in the M protein with reference to the wild type protein (SEQ ID NO: 10). In some embodiments, Glutamic acid at position 11 is substituted by a Lysine in the M protein with reference to the wild type protein (SEQ ID NO: 48).

[0099] In some embodiments, the amino acid sequence of the N protein is modified with reference to the wild type protein (protein N of Wuhan-HU-1, Accession LC521925.1; SEQ ID NO: 11). In some embodiments, the amino acid sequence of the N protein is modified with reference to the wild type protein (protein N of Wuhan-HU-1, Accession MN988668.1; SEQ ID NO: 49).

[0100] In some embodiments, the nucleic acid sequence encoding the SARS-CoV-2 virus protein is modified with reference to the wild type protein. In some embodiments, the nucleic acid sequence encoding the SARS-CoV-2 virus protein is modified with reference to the wild type protein (SEQ ID NO: 9). In some embodiments, the nucleic acid sequence encoding the SARS-CoV-2 virus protein is modified with reference to the wild type protein (SEQ ID NO: 47). In some embodiments, the nucleic acid sequence encoding the SARS-CoV-2 virus protein is modified with reference to the wild type protein for efficient expression of transgenes in poxviruses. In some embodiments, the heterologous gene coding sequences containing the vaccinia Early Transcription Terminator Signal (ETTS) (TTTTTNT; also called T₅NT (SEQ ID NO: 14)) are removed. See Earl et al. Journal of Virology, 1990; 2448-2451; incorporated herein by reference in its entirety. In some embodiments, the poxvirus genome retains two overlapping endogenous ETTS. In some embodiments, the heterologous gene coding sequences containing the vaccinia Early Transcription Terminator Signal (ETTS) (TTTTTNT; also called T₅NT (SEQ ID NO: 14)) are removed with reference to the nucleic sequence encoding the S protein of the SARS-CoV-2 virus (protein S of Wuhan-HU-1, Accession MN988668.1; SEQ ID NO: 47).

[0101] In some embodiments, the nucleic acid encoding a SARS-CoV-2 virus protein is operatively linked to a promoter. In some embodiments, the promoter is a poxvirus-specific promoter. In some embodiments, the promoter is located between the left flanking arm and the ATG of the transgene expression cassette. In some embodiments, the poxvirus promoter is a vaccinia virus early promoter. In some embodiments, the poxvirus promoter is an optimized vaccinia virus early promoter (AAAATTGAAANNNTANNNNNNNNNNNNNNNNNN; SEQ ID NO: 3). In some embodiments, the poxvirus promoter is a synthetic vaccinia virus late promoter (TTTTTTTTTTTTTTTTTTTNNNNNNTAAATG; SEQ ID NO: 4). In some embodiments, the poxvirus promoter is an overlapping synthetic early/late promoter (AAAAATTGAAATTTTATTTTTTTTTTTTGGAATATAAATA; SEQ ID NO: 5). See FIG. 8. See Chakrabarti et al. BioTechniques 23:1094-1097; incorporated herein by reference in its entirety.

[0102] In some embodiments, the vaccinia virus late promoter nucleotide sequence comprises the sequence set forth in SEQ ID NO: 6 (TTTTATTTTTTTTTTTTGGAATATAAATA). In some embodiments, the vaccinia virus late promoter is the sequence set forth in SEQ ID NO: 6. In some embodiments, the vaccinia virus late promoter nucleotide sequence comprises the sequence set forth in SEQ ID NO: 7 (AAAATTGAAAAAATA). In some embodiments, the poxvirus promoter is an overlapping synthetic early/late promoter comprising the sequence set forth in SEQ ID NO: 8 (TTTTATTTTTTTTTTTTGGAATATAAATATCCGGT AAAATTGAAAAAATA). In some embodiments, the poxvirus promoter is an overlapping synthetic early/late promoter comprising a nucleic acid spacer sequence of 38-160 nucleotides 3′ of the early promoter and between the RNA start site and the ATG. In some embodiments, the spacer is 160 nucleotides long, resulting in enhanced levels of expression. See FIG. 9. See Di Pilato et al. Journal of General Virology (2015), 96, 2360-2371; incorporated herein by reference in its entirety. In some embodiments, the vaccinia virus late promoter and the spacer comprises the sequence set forth in SEQ ID NO: 39. In some embodiments, the vaccinia virus late promoter and the spacer is the sequence set forth in SEQ ID NO: 39.

[0103] In some embodiments, the protein of the SARS-CoV-2 is inserted into a non-essential gene for replication. In some embodiments, the SARS-CoV-2 protein is inserted into the Thymidine Kinase (TK) locus (Gene ID HPXV095; positions 992077-92610; SEQ ID NO: 1) of the horsepox virus or the synthetic horsepox virus. In some embodiments, the SARS-CoV-2 protein is inserted into the Thymidine Kinase (TK) locus (Gene ID synVACV_105; positions 83823-84344; SEQ ID NO: 2) of the vaccinia virus or the synthetic vaccinia virus. The TK locus provides a stable insertion site for foreign genes of interest. The TK locus also provides a selection marker to identify those clones where the nucleic acid encoding a SARS-CoV-2 protein has been inserted. The clones where the nucleic acid encoding a SARS-CoV-2 protein is inserted are not capable of growing in the presence of 5-bromo-2-deoxyuridine (BrdU), which is an analogue of the pyrimidine deoxynucleoside thymidine, due to not having the TK gene.

[0104] An exemplary method to generate a recombinant poxvirus of the disclosure comprising the S protein of SARS-CoV-2 virus comprises:
[0105] a) Infect cells (e.g., Vero cells or BSC-40 cells) with the poxvirus (such as horsepox virus).
[0106] b) Obtain an expression cassette comprising: a nucleotide fragment comprising the nucleotide sequence encoding the S protein, wherein the resulting S protein comprises any one of the amino acid substitutions (i) Y459H, so that it is adapted for infection in mice; (ii) D614G; (iii) S943P; (iv) K986P or (v) V987P, or a combination thereof; and wherein the nucleotide sequence encoding the S protein comprises the deletion of two T5NT (SEQ ID NO: 14) sequences.
[0107] c) Obtain a nucleotide fragment comprising the vaccinia virus early/late promoter and position it upstream of the modified S protein. This expression cassette comprising the vaccinia virus early/late promoter and the engineered S gene is called “engineered SARS-CoV-2 S gene expression cassette”.
[0108] d) Transfect the infected cells (e.g., Vero cells or BSC-40 cells) with a PCR generated nucleotide fragment comprising the “engineered SARS-CoV-2 S gene expression cassette”. The helper virus catalyzes the recombination between fragments sharing flanking homologous sequences (the sequence between the left and right arm). Therefore, the expression cassette will be inserted into the TK gene via recombination between the left (HPXV094) and right (HPXV096) homologous sequences (arms). The left and right arms are approximately 400 bp sequences flanking the TK locus and are specific of the poxvirus to be generated. See FIG. 10.

### Methods of the Disclosure

[0109] Any of the synthetic poxviruses disclosed in US 2018/0251736 and WO 2019/213452, may be used in any of the methods disclosed herein.

[0110] Any of the recombinant poxviruses comprising a nucleic acid encoding a SARS-CoV-2 virus protein described in the present disclosure may be used in any of the methods disclosed herein.

[0111] In one aspect, the disclosure relates to a method for selecting a cell that expresses a SARS-CoV-2 virus protein, comprising infecting said cell with the recombinant poxvirus of the disclosure and selecting the infected cell expressing said SARS-CoV-2 virus protein.

[0112] In another aspect, the disclosure relates to a method of inducing an immune response against a SARS-CoV-2 virus in a subject, comprising administering to said subject an immunologically effective amount of the recombinant poxvirus of the disclosure.

[0113] In another aspect, the disclosure relates to a method of generating a recombinant poxvirus of the disclosure, the method comprising:

(a) Infecting a host cell with a poxvirus;
(b) Transfecting the infected cell of step (a) with a nucleic acid encoding a SARS-CoV-2 virus protein to generate a recombinant poxvirus; and
(c) Selecting a recombinant poxvirus, wherein the nucleic acid encoding a SARS-CoV-2 virus protein is located, upon transfection, in a region of the poxvirus that is not essential for the replication of the poxvirus.

[0114] In some embodiments, the recombinant poxvirus of the disclosure is used as a vaccine to express a SARS-CoV-2 virus protein. Methods to assess the safety, immunogenicity and protective capacity of the recombinant poxvirus are known in the art. See Kremer M et al. 2012. p 59-92. In Isaacs S N (ed), Vaccinia virus and poxvirology, vol 890. Humana Press, Totowa, N.J. In some embodiments, the immunization is via a subcutaneous route. In some embodiments, the immunization is via an intramuscular route. In some embodiments, the immunization is via an intranasal route. In some embodiments, the immunization is via scarification. In some embodiments, a range between about 10⁴ and about 10⁸ PFU of the recombinant poxvirus is used. In some embodiments, about 10⁴, about 10⁵, about 10⁶, about about 10⁷ or about 10⁸ PFU of recombinant poxvirus is used for the immunization. In some embodiments, about 10⁵ PFU of the recombinant poxvirus is used for the immunization. A physician will be able to determine the adequate PFU dosage for each subject. In some embodiments, one dose is administered to the subject. In some embodiments, more than one dose is administered to the subject.

[0115] In some embodiments, the recombinant poxvirus is useful towards the method of inducing an immune response against a SARS-CoV-2 virus in a subject, comprising administering to said subject an immunologically effective amount of a recombinant poxvirus or a pharmaceutical composition. In some embodiments, the recombinant poxvirus is useful towards the method of inducing an immune response against the SARS-CoV-2 virus in a subject, wherein the immunologically effective amount of the recombinant poxvirus is administered by scarification. In some embodiments, the recombinant poxvirus is useful towards the method of inducing an immune response against a SARS-CoV-2 virus in a subject, wherein the immune response comprises antibodies that are capable of neutralizing the SARS-CoV-2 virus. In some embodiments, the recombinant poxvirus is useful towards the method of inducing an immune response against a SARS-CoV-2 virus in a subject, wherein the immunologically effective amount of a recombinant poxvirus is capable of protecting the subject from SARS-CoV-2 virus. In some embodiments, the recombinant poxvirus is useful towards the method of inducing an immune response against a SARS-CoV-2 virus in a subject, wherein the immunologically effective amount of a recombinant poxvirus reduces or prevents the progression of the virus after SARS-CoV-2 infection in the subject. In some embodiments, the recombinant poxvirus is useful towards the method of inducing an immune response against a SARS-CoV-2 virus in a subject, wherein the immune response is a T-cell immune response.

[0116] In some embodiments, the recombinant poxvirus is useful towards the method of inducing an immune response against a SARS-CoV-2 virus and a poxvirus comprising administering to said subject an immunologically effective amount of a recombinant poxvirus or pharmaceutical composition. In some embodiments, the recombinant poxvirus is useful towards the method of inducing an immune response against the SARS-CoV-2 virus and the poxvirus, wherein said immunologically effective amount of the recombinant poxvirus is administered by scarification. In some embodiments, the recombinant poxvirus is useful towards the method of inducing an immune response against the SARS-CoV-2 virus and the poxvirus, wherein said immune response comprises antibodies that are capable of neutralizing the SARS-CoV-2 virus and the poxvirus. In some embodiments, the recombinant poxvirus is useful towards the method of inducing an immune response against the SARS-CoV-2 virus and the poxvirus, wherein the immunologically effective amount of a recombinant poxvirus is capable of protecting the subject from the SARS-CoV-2 virus and the variola virus. In some embodiments, the recombinant poxvirus is useful towards the method of inducing an immune response against the SARS-CoV-2 virus and the poxvirus, wherein the immunologically effective amount of a recombinant poxvirus reduces or prevents the progression of the SARS-CoV-2 virus infection and/or poxvirus infection in the subject. In some embodiments, the recombinant poxvirus is useful towards the method of inducing an immune response against the SARS-CoV-2 virus and the poxvirus, wherein the immune response is a T-cell immune response. In some embodiments, the recombinant poxvirus is useful towards the method of inducing an immune response against the SARS-CoV-2 virus and the poxvirus, wherein the poxvirus is vaccinia virus, variola, horsepox virus or monkeypox virus.

[0117] In some embodiments, the recombinant poxvirus is useful towards the method of inducing T cell immunity against a SARS-CoV-2 virus comprising administering to said subject an immunologically effective amount of a recombinant poxvirus or pharmaceutical composition. In some embodiments, the recombinant poxvirus is useful towards the method of inducing T cell immunity against the SARS-CoV-2 virus, wherein said immunologically effective amount of the recombinant poxvirus is administered by scarification. In some embodiments, the recombinant poxvirus is useful towards the method of inducing T cell immunity against the SARS-CoV-2 virus, wherein the immunologically effective amount of a recombinant poxvirus is capable of protecting the subject from SARS-CoV-2 virus. In some embodiments, the recombinant poxvirus is useful towards the method of inducing T cell immunity against the SARS-CoV-2 virus, wherein the immunologically effective amount of a recombinant poxvirus reduces or prevents the progression of the virus after SARS-CoV-2 infection in the subject.

[0118] In some embodiments, the recombinant poxvirus is useful towards the method of inducing T cell immunity against a SARS-CoV-2 virus and a poxvirus comprising administering to a subject an immunologically effective amount of the recombinant poxvirus reduces or pharmaceutical composition. In some embodiments, the recombinant poxvirus is useful towards the method of inducing T cell immunity against the SARS-CoV-2 virus and the poxvirus, wherein said immunologically effective amount of the recombinant poxvirus is administered by scarification. In some embodiments, the recombinant poxvirus is useful towards the method of inducing T cell immunity against the SARS-CoV-2 virus and the poxvirus, wherein the immunologically effective amount of a recombinant poxvirus is capable of protecting the subject from the SARS-CoV-2 virus and the poxvirus. In some embodiments, the recombinant poxvirus is useful towards the method of inducing T cell immunity against the SARS-CoV-2 virus and the poxvirus, wherein the immunologically effective amount of a recombinant poxvirus reduces or prevents the progression of the virus after SARS-CoV-2 infection and/or variola virus infection in the subject. In some embodiments, the recombinant poxvirus is useful towards the method of inducing T cell immunity against the SARS-CoV-2 virus and the poxvirus, wherein the poxvirus is vaccinia virus, variola, horsepox virus or monkeypox virus.

[0119] In some embodiments, the recombinant poxvirus is useful towards the method of reducing or preventing the progression of a SARS-CoV-2 virus infection in a subject in need or at risk thereof comprising administering to said subject an immunologically effective amount of the recombinant poxvirus or pharmaceutical composition.

[0120] In some embodiments, the recombinant poxvirus is useful towards the method of reducing or preventing the progression of a SARS-CoV-2 virus and a poxvirus infection in a subject in risk thereof comprising administering to said subject an immunologically effective amount of the recombinant poxvirus or pharmaceutical composition. In some embodiments, the recombinant poxvirus is useful towards the method of reducing or preventing the progression of the SARS-CoV-2 virus and the poxvirus infection, wherein the poxvirus is vaccinia virus, variola, horsepox virus or monkeypox virus.

[0121] In some embodiments, the recombinant poxvirus is useful for a vaccine against a SARS-CoV-2 virus comprising a recombinant virus or a pharmaceutical composition.

[0122] In some embodiments, the recombinant poxvirus is useful for a bivalent vaccine against a SARS-CoV-2 virus and a poxvirus comprising a recombinant virus or a pharmaceutical composition. In some embodiments, the recombinant poxvirus is useful for a bivalent vaccine against a SARS-CoV-2 virus, wherein the poxvirus is a vaccinia virus, variola, horsepox virus or monkeypox.

TABLE 1
Compilation of some of the sequences of the present disclosure.

| | | | |
|---|---|---|---|
| Synthetic horsepox virus | 1 | ATTTACGGATTCACCAATAAAAATAAACTAGAGAAACTTAGTACTAATAAGGAAC | 55 |
| comprising a nucleic acid | 56 | TAGAATCGTATAGTTCTAGCCCTCTTCAAGAACCCATTAGGTTAAATGATTTTCT | 110 |
| encoding a SARS-CoV-2 | 111 | GGGACTATTGGAATGTATTAAAAAGAATATTCCTCTAACAGATATTCCGACAAAG | 165 |
| virus S protein. | 166 | GATTGATTACTATAAATGGAGAATGTTCCTAATGTATACTTTAATCCTGTGTTTA | 220 |
| SEQ ID NO: 43 | 221 | TAGAGCCCACGTTTAAACATTCTTTATTAAGTGTTTATAAACACAGATTAATAGT | 275 |
| | 276 | TTTATTTGAAGTATTCATTGTATTCATTCTAATATATGTATTTTTTAGATCTGAA | 330 |
| | 331 | TTAAATATGTTCTTCATGCCTAAACGAAAAATACCCGATCCTATTGATAGATTAC | 385 |
| | 386 | GACGTGCTAATCTAGCGTGTGAAGACGATAAGTTAATGATCTATGGATTACCATG | 440 |
| | 441 | GATGACAACTCAAACATCTGCGTTATCAATAAATAGTAAACCGATAGTGTATAAA | 495 |
| | 496 | GATTGTGCAAAGCTTTTGCGATCAATAAATGGATCACAACCAGTATCTCTTAACG | 550 |
| | 551 | ATGTTCTTCGCAGATGATGATTCATTTTTTAAGTATTTGGCTAGTCAAGATGATG | 605 |
| | 606 | AATCTTCATTATCTGATATATTGCAAATCACTCAATATCTAGACTTTCTGTTATT | 660 |
| | 661 | ATTATTGATCCAATCAAAAAATAAATTAGAAGCCGTGGGTCATTGTTATGAATCT | 715 |
| | 716 | CTTTCAGAGGAATACAGACAATTGACAAAATTCACAGACTTTCAAGATTTTAAAA | 770 |
| | 771 | AACTGTTTAACAAGGTCCCTATTGTTACAGATGGAAGGGTCAAACTTAATAAAGG | 825 |
| | 826 | ATATTTGTTCGACTTTGTGATTAGTTTGATGCGATTCAAAAAAGAATCCTCTCTA | 880 |
| | 881 | GCTACCACCGCAATAGATCCTATTAGATACATAGATCCTCGTCGTGATATCGCAT | 935 |
| | 936 | TTTCTAACGTGATGGATATATTAAAGTTGAATAAAGTGAACAATAATTAATTCTT | 990 |
| | 991 | TATTGTCATCTTTTATTTTTTTTTTTTGGAATATAAATATCCGGTAAAATTGAAA | 1045 |
| | 1046 | AAATATACACTAATTAGCGTCTCGTTTCAGACGCTAGCTCGAGGTTGGGAGCTCT | 1100 |
| | 1101 | CCGGATCCAAGCTTATCGATTTCGAACCCGGGGTACCGAATTCCTCGAGGTTGGG | 1155 |
| | 1156 | AGCTCTCCGGATCCAAGCTTATCGATTTCGAACCCGGGGTACCGAATTCCTCGAG | 1210 |
| | 1211 | ATGTTTATTTTCTTATTATTTCTTACTCTCACTAGTGGTAGTGACCTTGACCGGT | 1265 |
| | 1266 | GCACCACTTTTGATGATGTTCAAGCTCCTAATTACACTCAACATACTTCATCTAT | 1320 |
| | 1321 | GAGGGGGGTTTACTATCCTGATGAAATTTTTAGATCAGACACTCTTTATTTAACT | 1375 |
| | 1376 | CAGGATTTATTTCTTCCATTTTATTCTAATGTTACAGGGTTTCATACTATTAATC | 1430 |
| | 1431 | ATACGTTTGGCAACCCTGTCATACCTTTTAAGGATGGTATTTATTTTGCTGCCAC | 1485 |
| | 1486 | AGAGAAATCAAATGTTGTCCGTGGTTGGGTTTTTGGTTCTACCATGAACAACAAG | 1540 |
| | 1541 | TCACAGTCGGTGATTATTATTAACAATTCTACTAATGTTGTTATACGAGCATGTA | 1595 |
| | 1596 | ACTTTGAATTGTGTGACAACCCTTTCTTTGCTGTTTCTAAACCCATGGGTACACA | 1650 |
| | 1651 | GACACATACTATGATATTCGATAATGCATTTAATTGCACTTTCGAGTACATATCT | 1705 |
| | 1706 | GATGCCTTTTCGCTTGATGTTTCAGAAAAGTCAGGTAATTTTAAACACTTACGAG | 1760 |
| | 1761 | AGTTTGTGTTTAAAAATAAAGATGGGTTTCTCTATGTTTATAAGGGCTATCAACC | 1815 |
| | 1816 | TATAGATGTAGTTCGTGATCTACCTTCTGGTTTTAACACTTTGAAACCTATTTTT | 1870 |
| | 1871 | AAGTTGCCTCTTGGTATTAACATTACAAATTTTAGAGCCATTCTTACAGCCTTTT | 1925 |
| | 1926 | CACCTGCTCAAGACATTTGGGGCACGTCAGCTGCAGCCTATTTTGTTGGCTATTT | 1980 |
| | 1981 | AAAGCCAACTACATTTATGCTCAAGTATGATGAAAATGGTACAATCACAGATGCT | 2035 |
| | 2036 | GTTGATTGTTCTCAAAATCCACTTGCTGAACTCAAATGCTCTGTTAAGAGCTTTG | 2090 |
| | 2091 | AGATTGACAAAGGAATTTACCAGACCTCTAATTTCAGGGTTGTTCCCTCAGGAGA | 2145 |
| | 2146 | TGTTGTGAGATTCCCTAATATTACAAACTTGTGTCCTTTTGGAGAGGTTTTTAAT | 2200 |
| | 2201 | GCTACTAAATTCCCTTCTGTCTATGCATGGGAGAGAAAAAAAATTTCTAATTGTG | 2255 |
| | 2256 | TTGCTGATTACTCTGTGCTCTACAACTCAACATTCTTTTCAACCTTTAAGTGCTA | 2310 |
| | 2311 | TGGCGTTTCTGCCACTAAGTTGAATGATCTTTGCTTCTCCAATGTCTATGCAGAT | 2365 |
| | 2366 | TCTTTTGTAGTCAAGGGAGATGATGTAAGACAAATAGCGCCAGGACAAACTGGTG | 2420 |
| | 2421 | TTATTGCTGATTATAATTATAAATTGCCAGATGATTTCATGGGTTGTGTCCTTGC | 2475 |
| | 2476 | TTGGAATACTAGGAACATTGATGCTACTTCAACTGGTAATCATAATTATAAATAT | 2530 |
| | 2531 | AGGTATCTTAGACATGGCAAGCTTAGGCCCTTTGAGAGAGACATATCTAATGTGC | 2585 |
| | 2586 | CTTTCTCCCCTGATGGCAAACCTTGCACCCCACCTGCTCTTAATTGTTATTGGCC | 2640 |
| | 2641 | ATTAAATGATTATGGTTTTTACACCACTACTGGCATTGGCTACCAACCTTACAGA | 2695 |
| | 2696 | GTTGTAGTACTTTCTTTTGAACTTTTAAATGCACCGGCCACGGTTTGTGGACCAA | 2750 |
| | 2751 | AATTATCCACTGACCTTATTAAGAACCAGTGTGTCAATTTTAATTTTAATGGACT | 2805 |
| | 2806 | CACTGGTACTGGTGTGTTAACTCCTTCTTCAAAGAGATTTCAACCATTTCAACAA | 2860 |
| | 2861 | TTTGGCCGTGATGTTTCTGATTTCACTGATTCCGTTCGAGATCCTAAAACATCTG | 2915 |
| | 2916 | AAATATTAGACATTTCACCTTGCTCTTTTGGGGGTGTAAGTGTAATTACACCTGG | 2970 |
| | 2971 | AACAAATGCTTCATCTGAAGTTGCTGTTCTATATCAAGATGTTAACTGCACTGAT | 3025 |
| | 3026 | GTTTCTACAGCAATTCATGCAGATCAACTCACACCAGCTTGGCGCATATATTCTA | 3080 |
| | 3081 | CTGGAAACAATGTATTCCAGACTCAAGCAGGCTGTCTTATAGGAGCTGAGCATGT | 3135 |
| | 3136 | CGACACTTCTTATGAGTGCGACATTCCTATTGGAGCTGGCATTTGTGCTAGTTAC | 3190 |
| | 3191 | CATACAGTTTCTTTATTACGTAGTACTAGCCAAAAATCTATTGTGGCTTATACTA | 3245 |
| | 3246 | TGTCTTTAGGTGCTGATAGTTCAATTGCTTACTCTAATAACACCATTGCTATACC | 3300 |
| | 3301 | TACTAACTTTTCAATTAGCATTACTACAGAAGTAATGCCTGTTTCTATGGCTAAA | 3355 |
| | 3356 | ACCTCCGTAGATTGTAATATGTACATCTGCGGAGATTCTACTGAATGTGCTAATT | 3410 |
| | 3411 | TGCTTCTCCAATATGGTAGCTTTTGCACACAACTAAATCGTGCACTCTCAGGTAT | 3465 |
| | 3466 | TGCTGCTGAACAGGATCGCAACACACGTGAAGTGTTCGCTCAAGTCAAACAAATG | 3520 |
| | 3521 | TACAAAACCCCAACTTTGAAATATTTTGGTGGTTTTAATTTTTCACAAATATTAC | 3575 |
| | 3576 | CTGACCCTCTAAAGCCAACTAAGAGGTCTTTTATTGAGGACTTGCTCTTTAATAA | 3630 |
| | 3631 | GGTGACACTCGCTGATGCTGGCTTCATGAAGCAATATGGCGAATGCCTAGGTGAT | 3685 |
| | 3686 | ATTAATGCTAGAGATCTCATTTGTGCGCAGAAGTTCAATGGACTTACAGTGTTGC | 3740 |
| | 3741 | CACCTCTGCTCACTGATGATATGATTGCTGCCTACACTGCTGCTCTAGTTAGTGG | 3795 |
| | 3796 | TACTGCCACTGCTGGATGGACATTTGGTGCTGGCGCTGCTCTTCAAATACCTTTT | 3850 |
| | 3851 | GCTATGCAAATGGCATATAGGTTCAATGGCATTGGAGTTACCCAAAATGTTCTCT | 3905 |
| | 3906 | ATGAGAACCAAAAACAAATCGCCAACCAATTTAACAAGGCGATTAGTCAAATTCA | 3960 |
| | 3961 | AGAATCACTTACAACAACATCAACTGCATTGGGCAAGCTGCAAGACGTTGTTAAC | 4015 |
| | 4016 | CAGAATGCTCAAGCATTAAACACACTTGTTAAACAACTTAGCTCTAATTTTGGTG | 4070 |
| | 4071 | CAATTTCAAGTGTGCTAAATGATATCCTTTCGCGACTTGATAAAGTCGAGGCGGA | 4125 |
| | 4126 | GGTACAAATTGACAGGTTAATTACAGGCAGACTTCAAAGCCTTCAAACCTATGTA | 4180 |
| | 4181 | ACACAACAACTAATCAGGGCTGCTGAAATCAGGGCTTCTGCTAATCTTGCTGCTA | 4235 |
| | 4236 | CTAAAATGTCTGAGTGTGTTCTTGGACAATCAAAAAGAGTTGACTTTTGTGGAAA | 4290 |
| | 4291 | GGGCTACCACCTTATGTCCTTCCCACAAGCAGCCCCGCATGGTGTTGTCTTCCTA | 4345 |
| | 4346 | CATGTCACGTATGTGCCATCCCAGGAGAGGAACTTCACCACAGCGCCAGCAATTT | 4400 |
| | 4401 | GTCATGAAGGCAAAGCATACTTCCCTCGTGAAGGTGTTTTCGTGTTTAATGGCAC | 4455 |
| | 4456 | TTCTTGGTTTATTACACAGAGGAACTTCTTTTCTCCACAAATAATTACTACAGAC | 4510 |
| | 4511 | AATACATTTGTCTCAGGAAATTGTGATGTCGTTATTGGCATCATTAACAACACAG | 4565 |
| | 4566 | TTTATGATCCTCTGCAACCTGAGCTCGACTCATTCAAAGAAGAGCTGGACAAGTA | 4620 |
| | 4621 | CTTCAAAAATCATACATCACCAGATGTTGATCTTGGCGACATTTCAGGCATTAAC | 4675 |
| | 4676 | GCTTCTGTCGTCAACATTCAAAAAGAAATTGACCGCCTCAATGAGGTCGCTAAAA | 4730 |
| | 4731 | ATTTAAATGAATCACTCATTGACCTTCAAGAATTGGGAAAATATGAGCAATATAT | 4785 |
| | 4786 | TAAATGGCCTTGGTATGTTTGGCTCGGCTTCATTGCTGGACTAATTGCCATCGTC | 4840 |
| | 4841 | ATGGTTACAATCTTGCTTTGTTGCATGACTAGTTGTTGCAGTTGCCTCAAGGGTG | 4895 |
| | 4896 | CATGCTCTTGTGGTTCTTGCTGCAAGTTTGATGAGGATGACTCTGAGCCAGTTCT | 4950 |
| | 4951 | CAAGGGTGTCAAATTACATTACACATAATATTATATTTTTTATCTAAAAAACTAA | 5005 |
| | 5006 | AAATAAACATTGATTAAATTTTAATATAATACTTAAAAATGGATGTTGTGTCGTT | 5060 |
| | 5061 | AGATAAACCGTTTATGTATTTTGAGGAAATTGATAATGAGTTAGATTACGAACCA | 5115 |
| | 5116 | GAAAGTGCAAATGAGGTCGCAAAAAAACTACCGTATCAAGGACAGTTAAAACTAT | 5170 |
| | 5171 | TACTAGGAGAATTATTTTTTCTTAGTAAGTTACAGCGACACGGTATATTAGATGG | 5225 |
| | 5226 | TGCCACCGTAGTGTATATAGGATCGGCTCCTGGTACACATATACGTTATTTGAGA | 5280 |
| | 5281 | GATCATTTCTATAATTTAGGAATGATTATCAAATGGATGCTAATTGACGGACGCC | 5335 |
| | 5336 | ATCATGATCCTATTCTAAATGGATTGCGTGATGTGACTCTAGTGACTCGGTTCGT | 5390 |
| | 5391 | TGATGAGGAATATCTACGATCCATCAAAAAACAACTGCATCCTTCTAAGATTATT | 5445 |
| | 5446 | TTAATTTCTGATGTAAGATCCAAACGAGGAGGAAATGAACCTAGTACGGCGGATT | 5500 |
| | 5501 | TACTAAGTAATTACGCTCTACAAAATGTCATGATTAGTATTTTAAACCCCGTGGC | 5555 |
| | 5556 | ATCTAGTCTTAAATGGAGATGCCCGTTTCCAGATCAATGGATCAAGGACTTTTAT | 5610 |
| | 5611 | ATCCCACACGGTAATAAAATGTTACAACCTTTTGCTCCTTCATATTCAGCTGAAA | 5665 |
| | 5666 | TGAGATTATTAAGTATTTATACCGGTGAGAACATGAGACTGACTCGAGTTACCAA | 5720 |
| | 5721 | ATTAGACGCTGTAAATTATGAAAAAAAGATGTACTACCTTAATAAGATCGTCCGT | 5775 |
| | 5776 | AACAAAGTAGTTGTTAACTTTGATTATCCTAATCAGGAATATGACTATTTTCACA | 5830 |
| | 5831 | TGTACTTTATGCTGAGGACCGTATACTGCAATAAAACATTTCCTACTACTAAAGC | 5885 |
| | 5886 | AAAGGTACTATTTCTACAACAATCTATATTTCGTTTCTTAAATATTCCAACAACA | 5940 |
| | 5941 | TCAACTGAAAAAGTTAGTCATGAACCAATACAACGTAA | 5978 |
| Synthetic vaccinia virus | 1 | ATTTACGGATTCACCAATAAAAATAAACTAGAGAAACTTAGTACTAATAAGGAAC | 55 |
| comprising a nucleic acid | 56 | TAGAATCGTATAGTTCTAGCCCTCTTCAAGAACCCATTAGGTTAAATGATTTTCT | 110 |
| encoding a SARS-CoV-2 | 111 | GGGACTATTGGAATGTGTTAAAAAGAATATTCCTCTAACAGATATTCCGACAAAG | 165 |
| virus S protein. | 166 | GATTGATTACTATAAATGGAGAATGTTCCTAATGTATACTTTAATCCTGTGTTTA | 220 |
| SEQ ID NO: 44 | 221 | TAGAGCCCACGTTTAAACATTCTTTATTAAGTGTTTATAAACACAGATTAATAGT | 275 |
| | 276 | TTTATTTGAAGTATTCGTTGTATTCATTCTAATATATGTATTTTTTAGATCTGAA | 330 |
| | 331 | TTAAATATGTTCTTCATGCCTAAACGAAAAATACCCGATCCTATTGATAGATTAC | 385 |
| | 386 | GACGTGCTAATCTAGCGTGTGAAGACGATAAATTAATGATCTATGGATTACCATG | 440 |
| | 441 | GATGACAACTCAAACATCTGCGTTATCAATAAATAGTAAACCGATAGTGTATAAA | 495 |
| | 496 | GATTGTGCAAAGCTTTTGCGATCAATAAATGGATCACAACCAGTATCTCTTAACG | 550 |
| | 551 | ATGTTCTTCGCAGATGATGATTCATTTTTTAAGTATTTGGCTAGTCAAGATGATG | 605 |
| | 606 | AATCTTCATTATCTGATATATTGCAAATCACTCAATATCTAGACTTTCTGTTATT | 660 |
| | 661 | ATTATTGATCCAATCAAAAAATAAATTAGAAGCCGTGGGTCATTGTTATGAATCT | 715 |
| | 716 | CTTTCAGAGGAATACAGACAATTGACAAAATTCACAGACTCTCAAGATTTTAAAA | 770 |
| | 771 | AACTGTTTAACAAGGTCCCTATTGTTACAGATGGAAGGGTCAAACTTAATAAAGG | 825 |
| | 826 | ATATTTGTTCGACTTTGTGATTAGTTTGATGCGATTCAAAAAAGAATCAGCTCTA | 880 |
| | 881 | GCTACCACCGCAATAGATCCTGTTAGATACATAGATCCTCGTCGCGATATCGCAT | 935 |
| | 936 | TTTCTAACGTGATGGATATATTAAAGTCGAATAAAGTGAACAATAATTAATTCTT | 990 |
| | 991 | TATTGTCATCTTTTATTTTTTTTTTTTGGAATATAAATATCCGGTAAAATTGAAA | 1045 |
| | 1046 | AAATATACACTAATTAGCGTCTCGTTTCAGACGCTAGCTCGAGGTTGGGAGCTCT | 1100 |
| | 1101 | CCGGATCCAAGCTTATCGATTTCGAACCCGGGGTACCGAATTCCTCGAGGTTGGG | 1155 |
| | 1156 | AGCTCTCCGGATCCAAGCTTATCGATTTCGAACCCGGGGTACCGAATTCCTCGAG | 1210 |
| | 1211 | ATGTTTATTTTCTTATTATTTCTTACTCTCACTAGTGGTAGTGACCTTGACCGGT | 1265 |
| | 1266 | GCACCACTTTTGATGATGTTCAAGCTCCTAATTACACTCAACATACTTCATCTAT | 1320 |
| | 1321 | GAGGGGGGTTTACTATCCTGATGAAATTTTTAGATCAGACACTCTTTATTTAACT | 1375 |
| | 1376 | CAGGATTTATTTCTTCCATTTTATTCTAATGTTACAGGGTTTCATACTATTAATC | 1430 |
| | 1431 | ATACGTTTGGCAACCCTGTCATACCTTTTAAGGATGGTATTTATTTTGCTGCCAC | 1485 |
| | 1486 | AGAGAAATCAAATGTTGTCCGTGGTTGGGTTTTTGGTTCTACCATGAACAACAAG | 1540 |
| | 1541 | TCACAGTCGGTGATTATTATTAACAATTCTACTAATGTTGTTATACGAGCATGTA | 1595 |
| | 1596 | ACTTTGAATTGTGTGACAACCCTTTCTTTGCTGTTTCTAAACCCATGGGTACACA | 1650 |
| | 1651 | GACACATACTATGATATTCGATAATGCATTTAATTGCACTTTCGAGTACATATCT | 1705 |
| | 1706 | GATGCCTTTTCGCTTGATGTTTCAGAAAAGTCAGGTAATTTTAAACACTTACGAG | 1760 |
| | 1761 | AGTTTGTGTTTAAAAATAAAGATGGGTTTCTCTATGTTTATAAGGGCTATCAACC | 1815 |
| | 1816 | TATAGATGTAGTTCGTGATCTACCTTCTGGTTTTAACACTTTGAAACCTATTTTT | 1870 |
| | 1871 | AAGTTGCCTCTTGGTATTAACATTACAAATTTTAGAGCCATTCTTACAGCCTTTT | 1925 |
| | 1926 | CACCTGCTCAAGACATTTGGGGCACGTCAGCTGCAGCCTATTTTGTTGGCTATTT | 1980 |
| | 1981 | AAAGCCAACTACATTTATGCTCAAGTATGATGAAAATGGTACAATCACAGATGCT | 2035 |
| | 2036 | GTTGATTGTTCTCAAAATCCACTTGCTGAACTCAAATGCTCTGTTAAGAGCTTTG | 2090 |
| | 2091 | AGATTGACAAAGGAATTTACCAGACCTCTAATTTCAGGGTTGTTCCCTCAGGAGA | 2145 |
| | 2146 | TGTTGTGAGATTCCCTAATATTACAAACTTGTGTCCTTTTGGAGAGGTTTTTAAT | 2200 |
| | 2201 | GCTACTAAATTCCCTTCTGTCTATGCATGGGAGAGAAAAAAAATTTCTAATTGTG | 2255 |
| | 2256 | TTGCTGATTACTCTGTGCTCTACAACTCAACATTCTTTTCAACCTTTAAGTGCTA | 2310 |
| | 2311 | TGGCGTTTCTGCCACTAAGTTGAATGATCTTTGCTTCTCCAATGTCTATGCAGAT | 2365 |
| | 2366 | TCTTTTGTAGTCAAGGGAGATGATGTAAGACAAATAGCGCCAGGACAAACTGGTG | 2420 |
| | 2421 | TTATTGCTGATTATAATTATAAATTGCCAGATGATTTCATGGGTTGTGTCCTTGC | 2475 |
| | 2476 | TTGGAATACTAGGAACATTGATGCTACTTCAACTGGTAATCATAATTATAAATAT | 2530 |
| | 2531 | AGGTATCTTAGACATGGCAAGCTTAGGCCCTTTGAGAGAGACATATCTAATGTGC | 2585 |
| | 2586 | CTTTCTCCCCTGATGGCAAACCTTGCACCCCACCTGCTCTTAATTGTTATTGGCC | 2640 |
| | 2641 | ATTAAATGATTATGGTTTTTACACCACTACTGGCATTGGCTACCAACCTTACAGA | 2695 |
| | 2696 | GTTGTAGTACTTTCTTTTGAACTTTTAAATGCACCGGCCACGGTTTGTGGACCAA | 2750 |
| | 2751 | AATTATCCACTGACCTTATTAAGAACCAGTGTGTCAATTTTAATTTTAATGGACT | 2805 |
| | 2806 | CACTGGTACTGGTGTGTTAACTCCTTCTTCAAAGAGATTTCAACCATTTCAACAA | 2860 |
| | 2861 | TTTGGCCGTGATGTTTCTGATTTCACTGATTCCGTTCGAGATCCTAAAACATCTG | 2915 |
| | 2916 | AAATATTAGACATTTCACCTTGCTCTTTTGGGGGTGTAAGTGTAATTACACCTGG | 2970 |
| | 2971 | AACAAATGCTTCATCTGAAGTTGCTGTTCTATATCAAGATGTTAACTGCACTGAT | 3025 |
| | 3026 | GTTTCTACAGCAATTCATGCAGATCAACTCACACCAGCTTGGCGCATATATTCTA | 3080 |
| | 3081 | CTGGAAACAATGTATTCCAGACTCAAGCAGGCTGTCTTATAGGAGCTGAGCATGT | 3135 |
| | 3136 | CGACACTTCTTATGAGTGCGACATTCCTATTGGAGCTGGCATTTGTGCTAGTTAC | 3190 |
| | 3191 | CATACAGTTTCTTTATTACGTAGTACTAGCCAAAAATCTATTGTGGCTTATACTA | 3245 |
| | 3246 | TGTCTTTAGGTGCTGATAGTTCAATTGCTTACTCTAATAACACCATTGCTATACC | 3300 |
| | 3301 | TACTAACTTTTCAATTAGCATTACTACAGAAGTAATGCCTGTTTCTATGGCTAAA | 3355 |
| | 3356 | ACCTCCGTAGATTGTAATATGTACATCTGCGGAGATTCTACTGAATGTGCTAATT | 3410 |
| | 3411 | TGCTTCTCCAATATGGTAGCTTTTGCACACAACTAAATCGTGCACTCTCAGGTAT | 3465 |
| | 3466 | TGCTGCTGAACAGGATCGCAACACACGTGAAGTGTTCGCTCAAGTCAAACAAATG | 3520 |
| | 3521 | TACAAAACCCCAACTTTGAAATATTTTGGTGGTTTTAATTTTTCACAAATATTAC | 3575 |
| | 3576 | CTGACCCTCTAAAGCCAACTAAGAGGTCTTTTATTGAGGACTTGCTCTTTAATAA | 3630 |
| | 3631 | GGTGACACTCGCTGATGCTGGCTTCATGAAGCAATATGGCGAATGCCTAGGTGAT | 3685 |
| | 3686 | ATTAATGCTAGAGATCTCATTTGTGCGCAGAAGTTCAATGGACTTACAGTGTTGC | 3740 |
| | 3741 | CACCTCTGCTCACTGATGATATGATTGCTGCCTACACTGCTGCTCTAGTTAGTGG | 3795 |
| | 3796 | TACTGCCACTGCTGGATGGACATTTGGTGCTGGCGCTGCTCTTCAAATACCTTTT | 3850 |
| | 3851 | GCTATGCAAATGGCATATAGGTTCAATGGCATTGGAGTTACCCAAAATGTTCTCT | 3905 |
| | 3906 | ATGAGAACCAAAAACAAATCGCCAACCAATTTAACAAGGCGATTAGTCAAATTCA | 3960 |
| | 3961 | AGAATCACTTACAACAACATCAACTGCATTGGGCAAGCTGCAAGACGTTGTTAAC | 4015 |
| | 4016 | CAGAATGCTCAAGCATTAAACACACTTGTTAAACAACTTAGCTCTAATTTTGGTG | 4070 |
| | 4071 | CAATTTCAAGTGTGCTAAATGATATCCTTTCGCGACTTGATAAAGTCGAGGCGGA | 4125 |
| | 4126 | GGTACAAATTGACAGGTTAATTACAGGCAGACTTCAAAGCCTTCAAACCTATGTA | 4180 |
| | 4181 | ACACAACAACTAATCAGGGCTGCTGAAATCAGGGCTTCTGCTAATCTTGCTGCTA | 4235 |
| | 4236 | CTAAAATGTCTGAGTGTGTTCTTGGACAATCAAAAAGAGTTGACTTTTGTGGAAA | 4290 |
| | 4291 | GGGCTACCACCTTATGTCCTTCCCACAAGCAGCCCCGCATGGTGTTGTCTTCCTA | 4345 |
| | 4346 | CATGTCACGTATGTGCCATCCCAGGAGAGGAACTTCACCACAGCGCCAGCAATTT | 4400 |
| | 4401 | GTCATGAAGGCAAAGCATACTTCCCTCGTGAAGGTGTTTTCGTGTTTAATGGCAC | 4455 |
| | 4456 | TTCTTGGTTTATTACACAGAGGAACTTCTTTTCTCCACAAATAATTACTACAGAC | 4510 |
| | 4511 | AATACATTTGTCTCAGGAAATTGTGATGTCGTTATTGGCATCATTAACAACACAG | 4565 |
| | 4566 | TTTATGATCCTCTGCAACCTGAGCTCGACTCATTCAAAGAAGAGCTGGACAAGTA | 4620 |
| | 4621 | CTTCAAAAATCATACATCACCAGATGTTGATCTTGGCGACATTTCAGGCATTAAC | 4675 |
| | 4676 | GCTTCTGTCGTCAACATTCAAAAAGAAATTGACCGCCTCAATGAGGTCGCTAAAA | 4730 |
| | 4731 | ATTTAAATGAATCACTCATTGACCTTCAAGAATTGGGAAAATATGAGCAATATAT | 4785 |
| | 4786 | TAAATGGCCTTGGTATGTTTGGCTCGGCTTCATTGCTGGACTAATTGCCATCGTC | 4840 |
| | 4841 | ATGGTTACAATCTTGCTTTGTTGCATGACTAGTTGTTGCAGTTGCCTCAAGGGTG | 4895 |
| | 4896 | CATGCTCTTGTGGTTCTTGCTGCAAGTTTGATGAGGATGACTCTGAGCCAGTTCT | 4950 |
| | 4951 | CAAGGGTGTCAAATTACATTACACATAATATTATATTTTTTATCTAAAAAACTAA | 5005 |
| | 5006 | AAATAAACATTGATTAAATTTTAATATAATACTTAAAAATGGATGTTGTGTCGTT | 5060 |
| | 5061 | AGATAAACCGTTTATGTATTTTGAGGAAATTGATAATGAGTTAGATTACGAACCA | 5115 |
| | 5116 | GAAAGTGCAAATGAGGTCGCAAAAAAACTGCCGTATCAAGGACAGTTAAAACTAT | 5170 |
| | 5171 | TACTAGGAGAATTATTTTTTCTTAGTAAGTTACAGCGACACGGTATATTAGATGG | 5225 |
| | 5226 | TGCCACCGTAGTGTATATAGGATCTGCTCCCGGTACACATATACGTTATTTGAGA | 5280 |
| | 5281 | GATCATTTCTATAATTTAGGAGTGATCATCAAATGGATGCTAATTGACGGCCGCC | 5335 |
| | 5336 | ATCATGATCCTATTTTAAATGGATTGCGTGATGTGACTCTAGTGACTCGGTTCGT | 5390 |
| | 5391 | TGATGAGGAATATCTACGATCCATCAAAAAACAACTGCATCCTTCTAAGATTATT | 5445 |
| | 5446 | TTAATTTCTGATGTGAGATCCAAACGAGGAGGAAATGAACCTAGTACGGCGGATT | 5500 |
| | 5501 | TACTAAGTAATTACGCTCTACAAAATGTCATGATTAGTATTTTAAACCCCGTGGC | 5555 |
| | 5556 | ATCTAGTCTTAAATGGAGATGCCCGTTTCCAGATCAATGGATCAAGGACTTTTAT | 5610 |
| | 5611 | ATCCCACACGGTAATAAAATGTTACAACCTTTTGCTCCTTCATATTCAGCTGAAA | 5665 |
| | 5666 | TGAGATTATTAAGTATTTATACCGGTGAGAACATGAGACTGACTCGAGTTACCAA | 5720 |
| | 5721 | ATTAGACGCTGTAAATTATGAAAAAAAGATGTACTACCTTAATAAGATCGTCCGT | 5775 |
| | 5776 | AACAAAGTAGTTGTTAACTTTGATTATCCTAATCAGGAATATGACTATTTTCACA | 5830 |
| | 5831 | TGTACTTTATGCTGAGGACCGTGTACTGCAATAAAACATTTCCTACTACTAAAGC | 5885 |
| | 5886 | AAAGGTACTATTTCTACAACAATCTATATTTCGTTTCTTAAATATTCCAACAACA | 5940 |
| | 5941 | TCAACTGAAAAAGTTAGTCATGAACCAATACAACGTAA | 5978 |

| Nucleic acid encoding S | 21562 | atgtttgtt tttcttgttt tattgccact agtctctagt |
|---|---|---|
| protein (21562-25383) | 21601 | cagtgtgtta atcttacaac cagaactcaa ttaccccctg catacactaa ttctttcaca |
| Gene Bank accession | 21661 | cgtggtgttt attaccctga caaagttttc agatcctcag ttttacattc aactcaggac |
| number MN988668 or | 21721 | ttgttcttac ctttcttttc caatgttact tggttccatg ctatacatgt ctctgggacc |
| (21579-25400) Gene Bank | 21781 | aatggtacta agaggtttga taaccctgtc ctaccattta atgatggtgt ttattttgct |
| accession number | 21841 | tccactgaga agtctaacat aataagaggc tggatttttg gtactacttt agattcgaag |
| NC_045512. SEQ ID NO: 45 | 21901 | acccagtccc tacttattgt taataacgct actaatgttg ttattaaagt ctgtgaattt |
| | 21961 | caattttgta atgatccatt tttgggtgtt tattaccaca aaaacaacaa aagttggatg |
| | 22021 | gaaagtgagt tcagagttta ttctagtgcg aataattgca cttttgaata tgtctctcag |
| | 22081 | ccttttctta tggaccttga aggaaaacag ggtaatttca aaaatcttag ggaatttgtg |
| | 22141 | tttaagaata ttgatggtta ttttaaaata tattctaagc acacgcctat taatttagtg |
| | 22201 | cgtgatctcc ctcagggttt ttcggcttta gaaccattgg tagatttgcc aataggtatt |
| | 22261 | aacatcacta ggtttcaaac tttacttgct ttacatagaa gttatttgac tcctggtgat |
| | 22321 | tcttcttcag gttggacagc tggtgctgca gcttattatg tgggttatct tcaacctagg |
| | 22381 | acttttctat taaaatataa tgaaaatgga accattacag atgctgtaga ctgtgcactt |
| | 22441 | gaccctctct cagaaacaaa gtgtacgttg aaatccttca ctgtagaaaa aggaatctat |
| | 22501 | caaacttcta actttagagt ccaaccaaca gaatctattg ttagatttcc taatattaca |
| | 22561 | aacttgtgcc cttttggtga agtttttaac gccaccagat ttgcatctgt ttatgcttgg |
| | 22621 | aacaggaaga gaatcagcaa ctgtgttgct gattattctg tcctatataa ttccgcatca |
| | 22681 | ttttccactt ttaagtgtta tggagtgtct cctactaaat taaatgatct ctgctttact |
| | 22741 | aatgtctatg cagattcatt tgtaattaga ggtgatgaag tcagacaaat cgctccaggg |
| | 22801 | caaactggaa agattgctga ttataattat aaattaccag atgattttac aggctgcgtt |
| | 22861 | atagcttgga attctaacaa tcttgattct aaggttggtg gtaattataa ttacctgtat |
| | 22921 | agattgttta ggaagtctaa tctcaaacct tttgagagag atatttcaac tgaaatctat |
| | 22981 | caggccggta gcacaccttg taatggtgtt gaaggtttta attgttactt tcctttacaa |
| | 23041 | tcatatggtt tccaacccac taatggtgtt ggttaccaac catacagagt agtagtactt |
| | 23101 | tcttttgaac ttctacatgc accagcaact gtttgtggac ctaaaaagtc tactaatttg |
| | 23161 | gttaaaaaca aatgtgtcaa tttcaacttc aatggtttaa caggcacagg tgttcttact |
| | 23221 | gagtctaaca aaaagtttct gcctttccaa caatttggca gagacattgc tgacactact |
| | 23281 | gatgctgtcc gtgatccaca gacacttgag attcttgaca ttacaccatg ttcttttggt |
| | 23341 | ggtgtcagtg ttataacacc aggaacaaat acttctaacc aggttgctgt tctttatcag |
| | 23401 | gatgttaact gcacagaagt ccctgttgct attcatgcag atcaacttac tcctacttgg |
| | 23461 | cgtgtttatt ctacaggttc taatgttttt caaacacgtg caggctgttt aataggggct |
| | 23521 | gaacatgtca acaactcata tgagtgtgac atacccattg gtgcaggtat atgcgctagt |
| | 23581 | tatcagactc agactaattc tcctcggcgg gcacgtagtg tagctagtca atccatcatt |
| | 23641 | gcctacacta tgtcacttgg tgcagaaaat tcagttgctt actctaataa ctctattgcc |
| | 23701 | atacccacaa attttactat tagtgttacc acagaaattc taccagtgtc tatgaccaag |
| | 23761 | acatcagtag attgtacaat gtacatttgt ggtgattcaa ctgaatgcag caatcttttg |
| | 23821 | ttgcaatatg gcagtttttg tacacaatta aaccgtgctt taactggaat agctgttgaa |
| | 23881 | caagacaaaa acacccaaga agtttttgca caagtcaaac aaatttacaa aacaccacca |
| | 23941 | attaaagatt ttggtggttt taatttttca caaatattac cagatccatc aaaaccaagc |
| | 24001 | aagaggtcat ttattgaaga tctacttttc aacaaagtga cacttgcaga tgctggcttc |
| | 24061 | atcaaacaat atggtgattg ccttggtgat attgctgcta gagacctcat ttgtgcacaa |
| | 24121 | aagtttaacg gccttactgt tttgccacct ttgctcacag atgaaatgat tgctcaatac |
| | 24181 | acttctgcac tgttagcggg tacaatcact tctggttgga cctttggtgc aggtgctgca |
| | 24241 | ttacaaatac catttgctat gcaaatggct tataggttta atggtattgg agttacacag |
| | 24301 | aatgttctct atgagaacca aaaattgatt gccaaccaat ttaatagtgc tattggcaaa |
| | 24361 | attcaagact cactttcttc cacagcaagt gcacttggaa aacttcaaga tgtggtcaac |
| | 24421 | caaaatgcac aagctttaaa cacgcttgtt aaacaactta gctccaattt tggtgcaatt |
| | 24481 | tcaagtgttt taaatgatat cctttcacgt cttgacaaag ttgaggctga agtgcaaatt |
| | 24541 | gataggttga tcacaggcag acttcaaagt ttgcagacat atgtgactca acaattaatt |
| | 24601 | agagctgcag aaatcagagc ttctgctaat cttgctgcta ctaaaatgtc agagtgtgta |
| | 24661 | cttggacaat caaaaagagt tgatttttgt ggaaagggct atcatcttat gtccttccct |
| | 24721 | cagtcagcac ctcatggtgt agtcttcttg catgtgactt atgtccctgc acaagaaaag |
| | 24781 | aacttcacaa ctgctcctgc catttgtcat gatggaaaag cacactttcc tcgtgaaggt |
| | 24841 | gtctttgttt caaatggcac acactggttt gtaacacaaa ggaattttta tgaaccacaa |
| | 24901 | atcattacta cagacaacac atttgtgtct ggtaactgtg atgttgtaat aggaattgtc |
| | 24961 | aacaacacag tttatgatcc tttgcaacct gaattagact cattcaagga ggagttagat |
| | 25021 | aaatatttta agaatcatac atcaccagat gttgatttag gtgacatctc tggcattaat |
| | 25081 | gcttcagttg taaacattca aaaagaaatt gaccgcctca atgaggttgc caagaattta |
| | 25141 | aatgaatctc tcatcgatct ccaagaactt ggaaagtatg agcagtatat aaaatggcca |
| | 25201 | tggtacattt ggctaggttt tatagctggc ttgattgcca tagtaatggt gacaattatg |
| | 25261 | ctttgctgta tgaccagttg ctgtagttgt ctcaagggct gttgttcttg tggatcctgc |
| | 25321 | tgcaaatttg atgaagacga ctctgagcca gtgctcaaag gagtcaaatt acattacaca |
| | 25381 | taa |
| Nucleotide Sequence of | 1 | ttaaaggttt ataccttccc aggtaacaaa ccaaccaact ttcgatctct tgtagatctg |
| SARS-CoV2 isolate 2019- | 61 | ttctctaaac gaactttaaa atctgtgtgg ctgtcactcg gctgcatgct tagtgcactc |
| nCoV WHU01, complete | 121 | acgcagtata attaataact aattactgtc gttgacagga cacgagtaac tcgtctatct |
| genome. GenBank Accession | 181 | tctgcaggct gcttacggtt tcgtccgtgt tgcagccgat catcagcaca tctaggtttc |
| Number MN988668.1. | 241 | gtccgggtgt gaccgaaagg taagatggag agccttgtcc ctggtttcaa cgagaaaaca |
| SEQ ID NO: 46 | 301 | cacgtccaac tcagtttgcc tgttttacag gttcgcgacg tgctcgtacg tggctttgga |
| | 361 | gactccgtgg aggaggtctt atcagaggca cgtcaacatc ttaaagatgg cacttgtggc |
| | 421 | ttagtagaag ttgaaaaagg cgttttgcct caacttgaac agccctatgt gttcatcaaa |
| | 481 | cgttcggatg ctcgaactgc acctcatggt catgttatgg ttgagctggt agcagaactc |
| | 541 | gaaggcattc agtacggtcg tagtggtgag acacttggtg tccttgtccc tcatgtgggc |
| | 601 | gaaataccag tggcttaccg caaggttctt cttcgtaaga acggtaataa aggagctggt |
| | 661 | ggccatagtt acggcgccga tctaaagtca tttgacttag gcgacgagct tggcactgat |
| | 721 | ccttatgaag attttcaaga aaactggaac actaaacata gcagtggtgt tacccgtgaa |
| | 781 | ctcatgcgtg agcttaacgg aggggcatac actcgctatg tcgataacaa cttctgtggc |
| | 841 | cctgatggct accctcttga gtgcattaaa gaccttctag cacgtgctgg taaagcttca |
| | 901 | tgcactttgt ccgaacaact ggactttatt gacactaaga ggggtgtata ctgctgccgt |
| | 961 | gaacatgagc atgaaattgc ttggtacacg gaacgttctg aaaagagcta tgaattgcag |
| | 1021 | acaccttttg aaattaaatt ggcaaagaaa tttgacacct tcaatgggga atgtccaaat |
| | 1081 | tttgtatttc ccttaaattc cataatcaag actattcaac caagggttga aaagaaaaag |
| | 1141 | cttgatggct ttatgggtag aattcgatct gtctatccag ttgcgtcacc aaatgaatgc |
| | 1201 | aaccaaatgt gcctttcaac tctcatgaag tgtgatcatt gtggtgaaac ttcatggcag |
| | 1261 | acgggcgatt ttgttaaagc cacttgcgaa ttttgtggca ctgagaattt gactaaagaa |
| | 1321 | ggtgccacta cttgtggtta cttaccccaa aatgctgttg ttaaaattta ttgtccagca |
| | 1381 | tgtcacaatt cagaagtagg acctgagcat agtcttgccg aataccataa tgaatctggc |
| | 1441 | ttgaaaacca ttcttcgtaa gggtggtcgc actattgcct ttggaggctg tgtgttctct |
| | 1501 | tatgttggtt gccataacaa gtgtgcctat tgggttccac gtgctagcgc taacataggt |
| | 1561 | tgtaaccata caggtgttgt tggagaaggt tccgaaggtc ttaatgacaa ccttcttgaa |
| | 1621 | atactccaaa aagagaaagt caacatcaat attgttggtg actttaaact taatgaagag |
| | 1681 | atcgccatta ttttggcatc tttttctgct tccacaagtg cttttgtgga aactgtgaaa |
| | 1741 | ggtttggatt ataaagcatt caaacaaatt gttgaatcct gtggtaattt taaagttaca |
| | 1801 | aaaggaaaag ctaaaaaagg tgcctggaat attggtgaac agaaatcaat actgagtcct |
| | 1861 | ctttatgcat ttgcatcaga ggctgctcgt gttgtacgat caattttctc ccgcactctt |
| | 1921 | gaaactgctc aaaattctgt gcgtgtttta cagaaggccg ctataacaat actagatgga |
| | 1981 | atttcacagt attcactgag actcattgat gctatgatgt tcacatctga tttggctact |
| | 2041 | aacaatctag ttgtaatggc ctacattaca ggtggtgttg ttcagttgac ttcgcagtgg |
| | 2101 | ctaactaaca tctttggcac tgtttatgaa aaactcaaac ccgtccttga ttggcttgaa |
| | 2161 | gagaagttta aggaaggtgt agagtttctt agagacggtt gggaaattgt taaatttatc |
| | 2221 | tcaacctgtg cttgtgaaat tgtcggtgga caaattgtca cctgtgcaaa ggaaattaag |
| | 2281 | gagagtgttc agacattctt taagcttgta aataaatttt tggctttgtg tgctgactct |
| | 2341 | atcattattg gtggagctaa acttaaagcc ttgaatttag gtgaaacatt tgtcacgcac |
| | 2401 | tcaaagggat tgtacagaaa gtgtgttaaa tccagagaag aaactggcct actcatgcct |
| | 2461 | ctaaaagccc caaaagaaat tatcttctta gagggagaaa cacttcccac agaagtgtta |
| | 2521 | acagaggaag ttgtcttgaa aactggtgat ttacaaccat tagaacaacc tactagtgaa |
| | 2581 | gctgttgaag ctccattggt tggtacacca gtttgtatta acgggcttat gttgctcgaa |
| | 2641 | atcaaagaca cagaaaagta ctgtgccctt gcacctaata tgatggtaac aaacaatacc |
| | 2701 | ttcacactca aaggcggtgc accaacaaag gttacttttg gtgatgacac tgtgatagaa |
| | 2761 | gtgcaaggtt acaagagtgt gaatatcact tttgaacttg atgaaaggat tgataaagta |
| | 2821 | cttaatgaga agtgctctgc ctatacagtt gaactcggta cagaagtaaa tgagttcgcc |
| | 2881 | tgtgttgtgg cagatgctgt cataaaaact ttgcaaccag tatctgaatt acttacacca |
| | 2941 | ctgggcattg atttagatga gtggagtatg gctacatact acttatttga tgagtctggt |
| | 3001 | gagtttaaat tggcttcaca tatgtattgt tctttctacc ctccagatga ggatgaagaa |
| | 3061 | gaaggtgatt gtgaagaaga agagtttgag ccatcaactc aatatgagta tggtactgaa |
| | 3121 | gatgattacc aaggtaaacc tttggaattt ggtgccactt ctgctgctct tcaacctgaa |
| | 3181 | gaagagcaag aagaagattg gttagatgat gatagtcaac aaactgttgg tcaacaagac |
| | 3241 | ggcagtgagg acaatcagac aactactatt caaacaattg ttgaggttca acctcaatta |
| | 3301 | gagatggaac ttacaccagt tgttcagact attgaagtga atagttttag tggttattta |
| | 3361 | aaacttactg acaatgtata cattaaaaat gcagacattg tggaagaagc taaaaaggta |
| | 3421 | aaaccaacag tggttgttaa tgcagccaat gtttacctta aacatggagg aggtgttgca |
| | 3481 | ggagccttaa ataaggctac taacaatgcc atgcaagttg aatctgatga ttacatagct |
| | 3541 | actaatggac cacttaaagt gggtggtagt tgtgttttaa gcggacacaa tcttgctaaa |
| | 3601 | cactgtcttc atgttgtcgg cccaaatgtt aacaaaggtg aagacattca acttcttaag |
| | 3661 | agtgcttatg aaaattttaa tcagcacgaa gttctacttg caccattatt atcagctggt |
| | 3721 | atttttggtg ctgaccctat acattcttta agagtttgtg tagatactgt tcgcacaaat |
| | 3781 | gtctacttag ctgtctttga taaaaatctc tatgacaaac ttgtttcaag ctttttggaa |
| | 3841 | atgaagagtg aaaagcaagt tgaacaaaag atcgctgaga ttcctaaaga ggaagttaag |
| | 3901 | ccatttataa ctgaaagtaa accttcagtt gaacagagaa aacaagatga taagaaaatc |
| | 3961 | aaagcttgtg ttgaagaagt tacaacaact ctggaagaaa ctaagttcct cacagaaaac |
| | 4021 | ttgttacttt atattgacat taatggcaat cttcatccag attctgccac tcttgttagt |
| | 4081 | gacattgaca tcactttctt aaagaaagat gctccatata tagtgggtga tgttgttcaa |
| | 4141 | gagggtgttt taactgctgt ggttatacct actaaaaagg ctggtggcac tactgaaatg |
| | 4201 | ctagcgaaag ctttgagaaa agtgccaaca gacaattata taaccactta cccgggtcag |
| | 4261 | ggtttaaatg gttacactgt agaggaggca aagacagtgc ttaaaaagtg taaaagtgcc |
| | 4321 | ttttacattc taccatctat tatctctaat gagaagcaag aaattcttgg aactgtttct |
| | 4381 | tggaatttgc gagaaatgct tgcacatgca gaagaaacac gcaaattaat gcctgtctgt |
| | 4441 | gtggaaacta aagccatagt ttcaactata cagcgtaaat ataagggtat taaaatacaa |
| | 4501 | gagggtgtgg ttgattatgg tgctagattt tacttttaca ccagtaaaac aactgtagcg |
| | 4561 | tcacttatca acacacttaa cgatctaaat gaaactcttg ttacaatgcc acttggctat |
| | 4621 | gtaacacatg gcttaaattt ggaagaagct gctcggtata tgagatctct caaagtgcca |
| | 4681 | gctacagttt ctgtttcttc acctgatgct gttacagcgt ataatggtta tcttacttct |
| | 4741 | tcttctaaaa cacctgaaga acattttatt gaaaccatct cacttgctgg ttcctataaa |
| | 4801 | gattggtcct attctggaca atctacacaa ctaggtatag aatttcttaa gagaggtgat |
| | 4861 | aaaagtgtat attacactag taatcctacc acattccacc tagatggtga agttatcacc |
| | 4921 | tttgacaatc ttaagacact tctttctttg agagaagtga ggactattaa ggtgtttaca |
| | 4981 | acagtagaca acattaacct ccacacgcaa gttgtggaca tgtcaatgac atatggacaa |
| | 5041 | cagtttggtc caacttattt ggatggagct gatgttacta aaataaaacc tcataattca |
| | 5101 | catgaaggta aaacatttta tgttttacct aatgatgaca ctctacgtgt tgaggctttt |
| | 5161 | gagtactacc acacaactga tcctagtttt ctgggtaggt acatgtcagc attaaatcac |
| | 5221 | actaaaaagt ggaaataccc acaagttaat ggtttaactt ctattaaatg ggcagataac |
| | 5281 | aactgttatc ttgccactgc attgttaaca ctccaacaaa tagagttgaa gtttaatcca |
| | 5341 | cctgctctac aagatgctta ttacagagca agggctggtg aagctgctaa cttttgtgca |
| | 5401 | cttatcttag cctactgtaa taagacagta ggtgagttag gtgatgttag agaaacaatg |
| | 5461 | agttacttgt ttcaacatgc caatttagat tcttgcaaaa gagtcttgaa cgtggtgtgt |
| | 5521 | aaaacttgtg gacaacagca gacaaccctt aagggtgtag aagctgttat gtacatgggc |
| | 5581 | acactttctt atgaacaatt taagaaaggt gttcagatac cttgtacgtg tggtaaacaa |
| | 5641 | gctacaaaat atctagtaca acaggagtca ccttttgtta tgatgtcagc accacctgct |
| | 5701 | cagtatgaac ttaagcatgg tacatttact tgtgctagtg agtacactgg taattaccag |
| | 5761 | tgtggtcact ataaacatat aacttctaaa gaaactttgt attgcataga cggtgcttta |
| | 5821 | cttacaaagt cctcagaata caaaggtcct attacggatg ttttctacaa agaaaacagt |
| | 5881 | tacacaacaa ccataaaacc agttacttat aaattggatg gtgttgtttg tacagaaatt |
| | 5941 | gaccctaagt tggacaatta ttataagaaa gacaattctt atttcacaga gcaaccaatt |
| | 6001 | gatcttgtac caaaccaacc atatccaaac gcaagcttcg ataattttaa gtttgtatgt |
| | 6061 | gataatatca aatttgctga tgatttaaac cagttaactg gttataagaa acctgcttca |
| | 6121 | agagagctta aagttacatt tttccctgac ttaaatggtg atgtggtggc tattgattat |
| | 6181 | aaacactaca caccctcttt taagaaagga gctaaattgt tacataaacc tattgtttgg |
| | 6241 | catgttaaca atgcaactaa taaagccacg tataaaccaa atacctggtg tatacgttgt |
| | 6301 | ctttggagca caaaaccagt tgaaacatca aattcgtttg atgtactgaa gtcagaggac |
| | 6361 | gcgcagggaa tggataatct tgcctgcgaa gatctaaaac cagtctctga agaagtagtg |
| | 6421 | gaaaatccta ccatacagaa agacgttctt gagtgtaatg tgaaaactac cgaagttgta |
| | 6481 | ggagacatta tacttaaacc agcaaataat agtttaaaaa ttacagaaga ggttggccac |
| | 6541 | acagatctaa tggctgctta tgtagacaat tctagtctta ctattaagaa acctaatgaa |
| | 6601 | ttatctagag tattaggttt gaaaaccctt gctactcatg gtttagctgc tgttaatagt |
| | 6661 | gtcccttggg atactatagc taattatgct aagccttttc ttaacaaagt tgttagtaca |
| | 6721 | actactaaca tagttacacg gtgtttaaac cgtgtttgta ctaattatat gccttatttc |
| | 6781 | tttactttat tgctacaatt gtgtactttt actagaagta caaattctag aattaaagca |
| | 6841 | tctatgccga ctactatagc aaagaatact gttaagagtg tcggtaaatt ttgtctagag |
| | 6901 | gcttcattta attatttgaa gtcacctaat ttttctaaac tgataaatat tataatttgg |
| | 6961 | tttttactat taagtgtttg cctaggttct ttaatctact caaccgctgc tttaggtgtt |
| | 7021 | ttaatgtcta atttaggcat gccttcttac tgtactggtt acagagaagg ctatttgaac |
| | 7081 | tctactaatg tcactattgc aacctactgt actggttcta taccttgtag tgtttgtctt |
| | 7141 | agtggtttag attctttaga cacctatcct tctttagaaa ctatacaaat taccatttca |
| | 7201 | tcttttaaat gggatttaac tgcttttggc ttagttgcag agtggttttt ggcatatatt |
| | 7261 | cttttcacta ggtttttcta tgtacttgga ttggctgcaa tcatgcaatt gtttttcagc |
| | 7321 | tattttgcag tacattttat tagtaattct tggcttatgt ggttaataat taatcttgta |
| | 7381 | caaatggccc cgatttcagc tatggttaga atgtacatct tctttgcatc attttattat |
| | 7441 | gtatggaaaa gttatgtgca tgttgtagac ggttgtaatt catcaacttg tatgatgtgt |
| | 7501 | tacaaacgta atagagcaac aagagtcgaa tgtacaacta ttgttaatgg tgttagaagg |
| | 7561 | tccttttatg tctatgctaa tggaggtaaa ggcttttgca aactacacaa ttggaattgt |
| | 7621 | gttaattgtg atacattctg tgctggtagt acatttatta gtgatgaagt tgcgagagac |
| | 7681 | ttgtcactac agtttaaaag accaataaat cctactgacc agtcttctta catcgttgat |
| | 7741 | agtgttacag tgaagaatgg ttccatccat ctttactttg ataaagctgg tcaaaagact |
| | 7801 | tatgaaagac attctctctc tcattttgtt aacttagaca acctgagagc taataacact |
| | 7861 | aaaggttcat tgcctattaa tgttatagtt tttgatggta aatcaaaatg tgaagaatca |
| | 7921 | tctgcaaaat cagcgtctgt ttactacagt cagcttatgt gtcaacctat actgttacta |
| | 7981 | gatcaggcat tagtgtctga tgttggtgat agtgcggaag ttgcagttaa aatgtttgat |
| | 8041 | gcttacgtta atacgttttc atcaactttt aacgtaccaa tggaaaaact caaaacacta |
| | 8101 | gttgcaactg cagaagctga acttgcaaag aatgtgtcct tagacaatgt cttatctact |
| | 8161 | tttatttcag cagctcggca agggtttgtt gattcagatg tagaaactaa agatgttgtt |
| | 8221 | gaatgtctta aattgtcaca tcaatctgac atagaagtta ctggcgatag ttgtaataac |
| | 8281 | tatatgctca cctataacaa agttgaaaac atgacacccc gtgaccttgg tgcttgtatt |
| | 8341 | gactgtagtg cgcgtcatat taatgcgcag gtagcaaaaa gtcacaacat tgctttgata |
| | 8401 | tggaacgtta aagatttcat gtcattgtct gaacaactac gaaaacaaat acgtagtgct |
| | 8461 | gctaaaaaga ataacttacc ttttaagttg acatgtgcaa ctactagaca agttgttaat |
| | 8521 | gttgtaacaa caaagatagc acttaagggt ggtaaaattg ttaataattg gttgaagcag |
| | 8581 | ttaattaaag ttacacttgt gttccttttt gttgctgcta ttttctattt aataacacct |
| | 8641 | gttcatgtca tgtctaaaca tactgacttt tcaagtgaaa tcataggata caaggctatt |
| | 8701 | gatggtggtg tcactcgtga catagcatct acagatactt gttttgctaa caaacatgct |
| | 8761 | gattttgaca catggtttag ccagcgtggt ggtagttata ctaatgacaa agcttgccca |
| | 8821 | ttgattgctg cagtcataac aagagaagtg ggttttgtcg tgcctggttt gcctggcacg |
| | 8881 | atattacgca caactaatgg tgactttttg catttcttac ctagagtttt tagtgcagtt |
| | 8941 | ggtaacatct gttacacacc atcaaaactt atagagtaca ctgactttgc aacatcagct |
| | 9001 | tgtgttttgg ctgctgaatg tacaattttt aaagatgctt ctggtaagcc agtaccatat |
| | 9061 | tgttatgata ccaatgtact agaaggttct gttgcttatg aaagtttacg ccctgacaca |
| | 9121 | cgttatgtgc tcatggatgg ctctattatt caatttccta acacctacct tgaaggttct |
| | 9181 | gttagagtgg taacaacttt tgattctgag tactgtaggc acggcacttg tgaaagatca |
| | 9241 | gaagctggtg tttgtgtatc tactagtggt agatgggtac ttaacaatga ttattacaga |
| | 9301 | tctttaccag gagttttctg tggtgtagat gctgtaaatt tacttactaa tatgtttaca |
| | 9361 | ccactaattc aacctattgg tgctttggac atatcagcat ctatagtagc tggtggtatt |
| | 9421 | gtagctatcg tagtaacatg ccttgcctac tattttatga ggtttagaag agcttttggt |
| | 9481 | gaatacagtc atgtagttgc ctttaatact ttactattcc ttatgtcatt cactgtactc |
| | 9541 | tgtttaacac cagtttactc attcttacct ggtgtttatt ctgttattta cttgtacttg |
| | 9601 | acattttatc ttactaatga tgtttctttt ttagcacata ttcagtggat ggttatgttc |
| | 9661 | acacctttag tacctttctg gataacaatt gcttatatca tttgtatttc cacaaagcat |
| | 9721 | ttctattggt tctttagtaa ttacctaaag agacgtgtag tctttaatgg tgtttccttt |
| | 9781 | agtacttttg aagaagctgc gctgtgcacc tttttgttaa ataaagaaat gtatctaaag |
| | 9841 | ttgcgtagtg atgtgctatt acctcttacg caatataata gatacttagc tctttataat |
| | 9901 | aagtacaagt attttagtgg agcaatggat acaactagct acagagaagc tgcttgttgt |
| | 9961 | catctcgcaa aggctctcaa tgacttcagt aactcaggtt ctgatgttct ttaccaacca |
| | 10021 | ccacaaacct ctatcacctc agctgttttg cagagtggtt ttagaaaaat ggcattccca |
| | 10081 | tctggtaaag ttgagggttg tatggtacaa gtaacttgtg gtacaactac acttaacggt |
| | 10141 | ctttggcttg atgacgtagt ttactgtcca agacatgtga tctgcacctc tgaagacatg |
| | 10201 | cttaacccta attatgaaga tttactcatt cgtaagtcta atcataattt cttggtacag |
| | 10261 | gctggtaatg ttcaactcag ggttattgga cattctatgc aaaattgtgt acttaagctt |
| | 10321 | aaggttgata cagccaatcc taagacacct aagtataagt ttgttcgcat tcaaccagga |
| | 10381 | cagacttttt cagtgttagc ttgttacaat ggttcaccat ctggtgttta ccaatgtgct |
| | 10441 | atgaggccca atttcactat taagggttca ttccttaatg gttcatgtgg tagtgttggt |
| | 10501 | tttaacatag attatgactg tgtctctttt tgttacatgc accatatgga attaccaact |
| | 10561 | ggagttcatg ctggcacaga cttagaaggt aacttttatg gaccttttgt tgacaggcaa |
| | 10621 | acagcacaag cagctggtac ggacacaact attacagtta atgttttagc ttggttgtac |
| | 10681 | gctgctgtta taaatggaga caggtggttt ctcaatcgat ttaccacaac tcttaatgac |
| | 10741 | tttaaccttg tggctatgaa gtacaattat gaacctctaa cacaagacca tgttgacata |
| | 10801 | ctaggacctc tttctgctca aactggaatt gccgttttag atatgtgtgc ttcattaaaa |
| | 10861 | gaattactgc aaaatggtat gaatggacgt accatattgg gtagtgcttt attagaagat |
| | 10921 | gaatttacac cttttgatgt tgttagacaa tgctcaggtg ttactttcca aagtgcagtg |
| | 10981 | aaaagaacaa tcaagggtac acaccactgg ttgttactca caattttgac ttcactttta |
| | 11041 | gttttagtcc agagtactca atggtctttg ttcttttttt tgtatgaaaa tgccttttta |
| | 11101 | ccttttgcta tgggtattat tgctatgtct gcttttgcaa tgatgtttgt caaacataag |
| | 11161 | catgcatttc tctgtttgtt tttgttacct tctcttgcca ctgtagctta ttttaatatg |
| | 11221 | gtctatatgc ctgctagttg ggtgatgcgt attatgacat ggttggatat ggttgatact |
| | 11281 | agtttgtctg gttttaagct aaaagactgt gttatgtatg catcagctgt agtgttacta |
| | 11341 | atccttatga cagcaagaac tgtgtatgat gatggtgcta ggagagtgtg gacacttatg |
| | 11401 | aatgtcttga cactcgttta taaagtttat tatggtaatg ctttagatca agccatttcc |
| | 11461 | atgtgggctc ttataatctc tgttacttct aactactcag gtgtagttac aactgtcatg |
| | 11521 | tttttggcca gaggtattgt ttttatgtgt gttgagtatt gccctatttt cttcataact |
| | 11581 | ggtaatacac ttcagtgtat aatgctagtt tattgtttct taggctattt ttgtacttgt |
| | 11641 | tactttggcc tcttttgttt actcaaccgc tactttagac tgactcttgg tgtttatgat |
| | 11701 | tacttagttt ctacacagga gtttagatat atgaattcac agggactact cccacccaag |
| | 11761 | aatagcatag atgccttcaa actcaacatt aaattgttgg gtgttggtgg caaaccttgt |
| | 11821 | atcaaagtag ccactgtaca gtctaaaatg tcagatgtaa agtgcacatc agtagtctta |
| | 11881 | ctctcagttt tgcaacaact cagagtagaa tcatcatcta aattgtgggc tcaatgtgtc |
| | 11941 | cagttacaca atgacattct cttagctaaa gatactactg aagcctttga aaaaatggtt |
| | 12001 | tcactacttt ctgttttgct ttccatgcag ggtgctgtag acataaacaa gctttgtgaa |
| | 12061 | gaaatgctgg acaacagggc aaccttacaa gctatagcct cagagtttag ttcccttcca |
| | 12121 | tcatatgcag cttttgctac tgctcaagaa gcttatgagc aggctgttgc taatggtgat |
| | 12181 | tctgaagttg ttcttaaaaa gttgaagaag tctttgaatg tggctaaatc tgaatttgac |
| | 12241 | cgtgatgcag ccatgcaacg taagttggaa aagatggctg atcaagctat gacccaaatg |
| | 12301 | tataaacagg ctagatctga ggacaagagg gcaaaagtta ctagtgctat gcagacaatg |
| | 12361 | cttttcacta tgcttagaaa gttggataat gatgcactca acaacattat caacaatgca |
| | 12421 | agagatggtt gtgttccctt gaacataata cctcttacaa cagcagccaa actaatggtt |
| | 12481 | gtcataccag actataacac atataaaaat acgtgtgatg gtacaacatt tacttatgca |
| | 12541 | tcagcattgt gggaaatcca acaggttgta gatgcagata gtaaaattgt tcaacttagt |
| | 12601 | gaaattagta tggacaattc acctaattta gcatggcctc ttattgtaac agctttaagg |
| | 12661 | gccaattctg ctgtcaaatt acagaataat gagcttagtc ctgttgcact acgacagatg |
| | 12721 | tcttgtgctg ccggtactac acaaactgct tgcactgatg acaatgcgtt agcttactac |
| | 12781 | aacacaacaa agggaggtag gtttgtactt gcactgttat ccgatttaca ggatttgaaa |
| | 12841 | tgggctagat tccctaagag tgatggaact ggtactatct atacagaact ggaaccacct |
| | 12901 | tgtaggtttg ttacagacac acctaaaggt cctaaagtga agtatttata ctttattaaa |
| | 12961 | ggattaaaca acctaaatag aggtatggta cttggtagtt tagctgccac agtacgtcta |
| | 13021 | caagctggta atgcaacaga agtgcctgcc aattcaactg tattatcttt ctgtgctttt |
| | 13081 | gctgtagatg ctgctaaagc ttacaaagat tatctagcta gtgggggaca accaatcact |
| | 13141 | aattgtgtta agatgttgtg tacacacact ggtactggtc aggcaataac agttacaccg |
| | 13201 | gaagccaata tggatcaaga atcctttggt ggtgcatcgt gttgtctgta ctgccgttgc |
| | 13261 | cacatagatc atccaaatcc taaaggattt tgtgacttaa aaggtaagta tgtacaaata |
| | 13321 | cctacaactt gtgctaatga ccctgtgggt tttacactta aaaacacagt ctgtaccgtc |
| | 13381 | tgcggtatgt ggaaaggtta tggctgtagt tgtgatcaac tccgcgaacc catgcttcag |
| | 13441 | tcagctgatg cacaatcgtt tttaaacggg tttgcggtgt aagtgcagcc cgtcttacac |
| | 13501 | cgtgcggcac aggcactagt actgatgtcg tatacagggc ttttgacatc tacaatgata |
| | 13561 | aagtagctgg ttttgctaaa ttcctaaaaa ctaattgttg tcgcttccaa gaaaaggacg |
| | 13621 | aagatgacaa tttaattgat tcttactttg tagttaagag acacactttc tctaactacc |
| | 13681 | aacatgaaga aacaatttat aatttactta aggattgtcc agctgttgct aaacatgact |
| | 13741 | tctttaagtt tagaatagac ggtgacatgg taccacatat atcacgtcaa cgtcttacta |
| | 13801 | aatacacaat ggcagacctc gtctatgctt taaggcattt tgatgaaggt aattgtgaca |
| | 13861 | cattaaaaga aatacttgtc acatacaatt gttgtgatga tgattatttc aataaaaagg |
| | 13921 | actggtatga ttttgtagaa aacccagata tattacgcgt atacgccaac ttaggtgaac |
| | 13981 | gtgtacgcca agctttgtta aaaacagtac aattctgtga tgccatgcga aatgctggta |
| | 14041 | ttgttggtgt actgacatta gataatcaag atctcaatgg taactggtat gatttcggtg |
| | 14101 | atttcataca aaccacgcca ggtagtggag ttcctgttgt agattcttat tattcattgt |
| | 14161 | taatgcctat attaaccttg accagggctt taactgcaga gtcacatgtt gacactgact |
| | 14221 | taacaaagcc ttacattaag tgggatttgt taaaatatga cttcacggaa gagaggttaa |
| | 14281 | aactctttga ccgttatttt aaatattggg atcagacata ccacccaaat tgtgttaact |
| | 14341 | gtttggatga cagatgcatt ctgcattgtg caaactttaa tgttttattc tctacagtgt |
| | 14401 | tcccacctac aagttttgga ccactagtga gaaaaatatt tgttgatggt gttccatttg |
| | 14461 | tagtttcaac tggataccac ttcagagagc taggtgttgt acataatcag gatgtaaact |
| | 14521 | tacatagctc tagacttagt tttaaggaat tacttgtgta tgctgctgac cctgctatgc |
| | 14581 | acgctgcttc tggtaatcta ttactagata aacgcactac gtgcttttca gtagctgcac |
| | 14641 | ttactaacaa tgttgctttt caaactgtca aacccggtaa ttttaacaaa gacttctatg |
| | 14701 | actttgctgt gtctaagggt ttctttaagg aaggaagttc tgttgaatta aaacacttct |
| | 14761 | tctttgctca ggatggtaat gctgctatca gcgattatga ctactatcgt tataatctac |
| | 14821 | caacaatgtg tgatatcaga caactactat ttgtagttga agttgttgat aagtactttg |
| | 14881 | attgttacga tggtggctgt attaatgcta accaagtcat cgtcaacaac ctagacaaat |
| | 14941 | cagctggttt tccatttaat aaatggggta aggctagact ttattatgat tcaatgagtt |
| | 15001 | atgaggatca agatgcactt ttcgcatata caaaacgtaa tgtcatccct actataactc |
| | 15061 | aaatgaatct taagtatgcc attagtgcaa agaatagagc tcgcaccgta gctggtgtct |
| | 15121 | ctatctgtag tactatgacc aatagacagt ttcatcaaaa attattgaaa tcaatagccg |
| | 15181 | ccactagagg agctactgta gtaattggaa caagcaaatt ctatggtggt tggcacaaca |
| | 15241 | tgttaaaaac tgtttatagt gatgtagaaa accctcacct tatgggttgg gattatccta |
| | 15301 | aatgtgatag agccatgcct aacatgctta gaattatggc ctcacttgtt cttgctcgca |
| | 15361 | aacatacaac gtgttgtagc ttgtcacacc gtttctatag attagctaat gagtgtgctc |
| | 15421 | aagtattgag tgaaatggtc atgtgtggcg gttcactata tgttaaacca ggtggaacct |
| | 15481 | catcaggaga tgccacaact gcttatgcta atagtgtttt taacatttgt caagctgtca |
| | 15541 | cggccaatgt taatgcactt ttatctactg atggtaacaa aattgccgat aagtatgtcc |
| | 15601 | gcaatttaca acacagactt tatgagtgtc tctatagaaa tagagatgtt gacacagact |
| | 15661 | ttgtgaatga gttttacgca tatttgcgta aacatttctc aatgatgata ctctctgacg |
| | 15721 | atgctgttgt gtgtttcaat agcacttatg catctcaagg tctagtggct agcataaaga |
| | 15781 | actttaagtc agttctttat tatcaaaaca atgtttttat gtctgaagca aaatgttgga |
| | 15841 | ctgagactga ccttactaaa ggacctcatg aattttgctc tcaacataca atgctagtta |
| | 15901 | aacagggtga tgattatgtg taccttcctt acccagatcc atcaagaatc ctaggggccg |
| | 15961 | gctgttttgt agatgatatc gtaaaaacag atggtacact tatgattgaa cggttcgtgt |
| | 16021 | ctttagctat agatgcttac ccacttacta aacatcctaa tcaggagtat gctgatgtct |
| | 16081 | ttcatttgta cttacaatac ataagaaagc tacatgatga gttaacagga cacatgttag |
| | 16141 | acatgtattc tgttatgctt actaatgata acacttcaag gtattgggaa cctgagtttt |
| | 16201 | atgaggctat gtacacaccg catacagtct tacaggctgt tggggcttgt gttctttgca |
| | 16261 | attcacagac ttcattaaga tgtggtgctt gcatacgtag accattctta tgttgtaaat |
| | 16321 | gctgttacga ccatgtcata tcaacatcac ataaattagt cttgtctgtt aatccgtatg |
| | 16381 | tttgcaatgc tccaggttgt gatgtcacag atgtgactca actttactta ggaggtatga |
| | 16441 | gctattattg taaatcacat aaaccaccca ttagttttcc attgtgtgct aatggacaag |
| | 16501 | tttttggttt atataaaaat acatgtgttg gtagcgataa tgttactgac tttaatgcaa |
| | 16561 | ttgcaacatg tgactggaca aatgctggtg attacatttt agctaacacc tgtactgaaa |
| | 16621 | gactcaagct ttttgcagca gaaacgctca aagctactga ggagacattt aaactgtctt |
| | 16681 | atggtattgc tactgtacgt gaagtgctgt ctgacagaga attacatctt tcatgggaag |
| | 16741 | ttggtaaacc tagaccacca cttaaccgaa attatgtctt tactggttat cgtgtaacta |
| | 16801 | aaaacagtaa agtacaaata ggagagtaca cctttgaaaa aggtgactat ggtgatgctg |
| | 16861 | ttgtttaccg aggtacaaca acttacaaat taaatgttgg tgattatttt gtgctgacat |
| | 16921 | cacatacagt aatgccatta agtgcaccta cactagtgcc acaagagcac tatgttagaa |
| | 16981 | ttactggctt atacccaaca ctcaatatct cagatgagtt ttctagcaat gttgcaaatt |
| | 17041 | atcaaaaggt tggtatgcaa aagtattcta cactccaggg accacctggt actggtaaga |
| | 17101 | gtcattttgc tattggccta gctctctact acccttctgc tcgcatagtg tatacagctt |
| | 17161 | gctctcatgc cgctgttgat gcactatgtg agaaggcatt aaaatatttg cctatagata |
| | 17221 | aatgtagtag aattatacct gcacgtgctc gtgtagagtg ttttgataaa ttcaaagtga |
| | 17281 | attcaacatt agaacagtat gtcttttgta ctgtaaatgc attgcctgag acgacagcag |
| | 17341 | atatagttgt ctttgatgaa atttcaatgg ccacaaatta tgatttgagt gttgtcaatg |
| | 17401 | ccagattacg tgctaagcac tatgtgtaca ttggcgaccc tgctcaatta cctgcaccac |
| | 17461 | gcacattgct aactaagggc acactagaac cagaatattt caattcagtg tgtagactta |
| | 17521 | tgaaaactat aggtccagac atgttcctcg gaacttgtcg gcgttgtcct gctgaaattg |
| | 17581 | ttgacactgt gagtgctttg gtttatgata ataagcttaa agcacataaa gacaaatcag |
| | 17641 | ctcaatgctt taaaatgttt tataagggtg ttatcacgca tgatgtttca tctgcaatta |
| | 17701 | acaggccaca aataggcgtg gtaagagaat tccttacacg taaccctgct tggagaaaag |
| | 17761 | ctgtctttat ttcaccttat aattcacaga atgctgtagc ctcaaagatt ttgggactac |
| | 17821 | caactcaaac tgttgattca tcacagggct cagaatatga ctatgtcata ttcactcaaa |
| | 17881 | ccactgaaac agctcactct tgtaatgtaa acagatttaa tgttgctatt accagagcaa |
| | 17941 | aagtaggcat actttgcata atgtctgata gagaccttta tgacaagttg caatttacaa |
| | 18001 | gtcttgaaat tccacgtagg aatgtggcaa ctttacaagc tgaaaatgta acaggactct |
| | 18061 | ttaaagattg tagtaaggta atcactgggt tacatcctac acaggcacct acacacctca |
| | 18121 | gtgttgacac taaattcaaa actgaaggtt tatgtgttga catacctggc atacctaagg |
| | 18181 | acatgaccta tagaagactc atctctatga tgggttttaa aatgaattat caagttaatg |
| | 18241 | gttaccctaa catgtttatc acccgcgaag aagctataag acatgtacgt gcatggattg |
| | 18301 | gcttcgatgt cgaggggtgt catgctacta gagaagctgt tggtaccaat ttacctttac |
| | 18361 | agctaggttt ttctacaggt gttaacctag ttgctgtacc tacaggttat gttgatacac |
| | 18421 | ctaataatac agatttttcc agagttagtg ctaaaccacc gcctggagat caatttaaac |
| | 18481 | acctcatacc acttatgtac aaaggacttc cttggaatgt agtgcgtata aagattgtac |
| | 18541 | aaatgttaag tgacacactt aaaaatctct ctgacagagt cgtatttgtc ttatgggcac |
| | 18601 | atggctttga gttgacatct atgaagtatt ttgtgaaaat aggacctgag cgcacctgtt |
| | 18661 | gtctatgtga tagacgtgcc acatgctttt ccactgcttc agacacttat gcctgttggc |
| | 18721 | atcattctat tggatttgat tacgtctata atccgtttat gattgatgtt caacaatggg |
| | 18781 | gttttacagg taacctacaa agcaaccatg atctgtattg tcaagtccat ggtaatgcac |
| | 18841 | atgtagctag ttgtgatgca atcatgacta ggtgtctagc tgtccacgag tgctttgtta |
| | 18901 | agcgtgttga ctggactatt gaatatccta taattggtga tgaactgaag attaatgcgg |
| | 18961 | cttgtagaaa ggttcaacac atggttgtta aagctgcatt attagcagac aaattcccag |
| | 19021 | ttcttcacga cattggtaac cctaaagcta ttaagtgtgt acctcaagct gatgtagaat |
| | 19081 | ggaagttcta tgatgcacag ccttgtagtg acaaagctta taaaatagaa gaattattct |
| | 19141 | attcttatgc cacacattct gacaaattca cagatggtgt atgcctattt tggaattgca |
| | 19201 | atgtcgatag atatcctgct aattccattg tttgtagatt tgacactaga gtgctatcta |
| | 19261 | accttaactt gcctggttgt gatggtggca gtttgtatgt aaataaacat gcattccaca |
| | 19321 | caccagcttt tgataaaagt gcttttgtta atttaaaaca attaccattt ttctattact |
| | 19381 | ctgacagtcc atgtgagtct catggaaaac aagtagtgtc agatatagat tatgtaccac |
| | 19441 | taaagtctgc tacgtgtata acacgttgca atttaggtgg tgctgtctgt agacatcatg |
| | 19501 | ctaatgagta cagattgtat ctcgatgctt ataacatgat gatctcagct ggctttagct |
| | 19561 | tgtgggttta caaacaattt gatacttata acctctggaa cacttttaca agacttcaga |
| | 19621 | gtttagaaaa tgtggctttt aatgttgtaa ataagggaca ctttgatgga caacagggtg |
| | 19681 | aagtaccagt ttctatcatt aataacactg tttacacaaa agttgatggt gttgatgtag |
| | 19741 | aattgtttga aaataaaaca acattacctg ttaatgtagc atttgagctt tgggctaagc |
| | 19801 | gcaacattaa accagtacca gaggtgaaaa tactcaataa tttgggtgtg gacattgctg |
| | 19861 | ctaatactgt gatctgggac tacaaaagag atgctccagc acatatatct actattggtg |
| | 19921 | tttgttctat gactgacata gccaagaaac caactgaaac gatttgtgca ccactcactg |
| | 19981 | tcttttttga tggtagagtt gatggtcaag tagacttatt tagaaatgcc cgtaatggtg |
| | 20041 | ttcttattac agaaggtagt gttaaaggtt tacaaccatc tgtaggtccc aaacaagcta |
| | 20101 | gtcttaatgg agtcacatta attggagaag ccgtaaaaac acagttcaat tattataaga |
| | 20161 | aagttgatgg tgttgtccaa caattacctg aaacttactt tactcagagt agaaatttac |
| | 20221 | aagaatttaa acccaggagt caaatggaaa ttgatttctt agaattagct atggatgaat |
| | 20281 | tcattgaacg gtataaatta gaaggctatg ccttcgaaca tatcgtttat ggagatttta |
| | 20341 | gtcatagtca gttaggtggt ttacatctac tgattggact agctaaacgt tttaaggaat |
| | 20401 | caccttttga attagaagat tttattccta tggacagtac agttaaaaac tatttcataa |
| | 20461 | cagatgcgca aacaggttca tctaagtgtg tgtgttctgt tattgattta ttacttgatg |
| | 20521 | attttgttga aataataaaa tcccaagatt tatctgtagt ttctaaggtt gtcaaagtga |
| | 20581 | ctattgacta tacagaaatt tcatttatgc tttggtgtaa agatggccat gtagaaacat |
| | 20641 | tttacccaaa attacaatct agtcaagcgt ggcaaccggg tgttgctatg cctaatcttt |
| | 20701 | acaaaatgca aagaatgcta ttagaaaagt gtgaccttca aaattatggt gatagtgcaa |
| | 20761 | cattacctaa aggcataatg atgaatgtcg caaaatatac tcaactgtgt caatatttaa |
| | 20821 | acacattaac attagctgta ccctataata tgagagttat acattttggt gctggttctg |
| | 20881 | ataaaggagt tgcaccaggt acagctgttt taagacagtg gttgcctacg ggtacgctgc |
| | 20941 | ttgtcgattc agatcttaat gactttgtct ctgatgcaga ttcaactttg attggtgatt |
| | 21001 | gtgcaactgt acatacagct aataaatggg atctcattat tagtgatatg tacgacccta |
| | 21061 | agactaaaaa tgttacaaaa gaaaatgact ctaaagaggg ttttttcact tacatttgtg |
| | 21121 | ggtttataca acaaaagcta gctcttggag gttccgtggc tataaagata acagaacatt |
| | 21181 | cttggaatgc tgatctttat aagctcatgg gacacttcgc atggtggaca gcctttgtta |
| | 21241 | ctaatgtgaa tgcgtcatca tctgaagcat ttttaattgg atgtaattat cttggcaaac |
| | 21301 | cacgcgaaca aatagatggt tatgtcatgc atgcaaatta catattttgg aggaatacaa |
| | 21361 | atccaattca gttgtcttcc tattctttat ttgacatgag taaatttccc cttaaattaa |
| | 21421 | ggggtactgc tgttatgtct ttaaaagaag gtcaaatcaa tgatatgatt ttatctcttc |
| | 21481 | ttagtaaagg tagacttata attagagaaa acaacagagt tgttatttct agtgatgttc |
| | 21541 | ttgttaacaa ctaaacgaac aatgtttgtt tttcttgttt tattgccact agtctctagt |
| | 21601 | cagtgtgtta atcttacaac cagaactcaa ttaccccctg catacactaa ttctttcaca |
| | 21661 | cgtggtgttt attaccctga caaagttttc agatcctcag ttttacattc aactcaggac |
| | 21721 | ttgttcttac ctttcttttc caatgttact tggttccatg ctatacatgt ctctgggacc |
| | 21781 | aatggtacta agaggtttga taaccctgtc ctaccattta atgatggtgt ttattttgct |
| | 21841 | tccactgaga agtctaacat aataagaggc tggatttttg gtactacttt agattcgaag |
| | 21901 | acccagtccc tacttattgt taataacgct actaatgttg ttattaaagt ctgtgaattt |
| | 21961 | caattttgta atgatccatt tttgggtgtt tattaccaca aaaacaacaa aagttggatg |
| | 22021 | gaaagtgagt tcagagttta ttctagtgcg aataattgca cttttgaata tgtctctcag |
| | 22081 | ccttttctta tggaccttga aggaaaacag ggtaatttca aaaatcttag ggaatttgtg |
| | 22141 | tttaagaata ttgatggtta ttttaaaata tattctaagc acacgcctat taatttagtg |
| | 22201 | cgtgatctcc ctcagggttt ttcggcttta gaaccattgg tagatttgcc aataggtatt |
| | 22261 | aacatcacta ggtttcaaac tttacttgct ttacatagaa gttatttgac tcctggtgat |
| | 22321 | tcttcttcag gttggacagc tggtgctgca gcttattatg tgggttatct tcaacctagg |
| | 22381 | acttttctat taaaatataa tgaaaatgga accattacag atgctgtaga ctgtgcactt |
| | 22441 | gaccctctct cagaaacaaa gtgtacgttg aaatccttca ctgtagaaaa aggaatctat |
| | 22501 | caaacttcta actttagagt ccaaccaaca gaatctattg ttagatttcc taatattaca |
| | 22561 | aacttgtgcc cttttggtga agtttttaac gccaccagat ttgcatctgt ttatgcttgg |
| | 22621 | aacaggaaga gaatcagcaa ctgtgttgct gattattctg tcctatataa ttccgcatca |
| | 22681 | ttttccactt ttaagtgtta tggagtgtct cctactaaat taaatgatct ctgctttact |
| | 22741 | aatgtctatg cagattcatt tgtaattaga ggtgatgaag tcagacaaat cgctccaggg |
| | 22801 | caaactggaa agattgctga ttataattat aaattaccag atgattttac aggctgcgtt |
| | 22861 | atagcttgga attctaacaa tcttgattct aaggttggtg gtaattataa ttacctgtat |
| | 22921 | agattgttta ggaagtctaa tctcaaacct tttgagagag atatttcaac tgaaatctat |
| | 22981 | caggccggta gcacaccttg taatggtgtt gaaggtttta attgttactt tcctttacaa |
| | 23041 | tcatatggtt tccaacccac taatggtgtt ggttaccaac catacagagt agtagtactt |
| | 23101 | tcttttgaac ttctacatgc accagcaact gtttgtggac ctaaaaagtc tactaatttg |
| | 23161 | gttaaaaaca aatgtgtcaa tttcaacttc aatggtttaa caggcacagg tgttcttact |
| | 23221 | gagtctaaca aaaagtttct gcctttccaa caatttggca gagacattgc tgacactact |
| | 23281 | gatgctgtcc gtgatccaca gacacttgag attcttgaca ttacaccatg ttcttttggt |
| | 23341 | ggtgtcagtg ttataacacc aggaacaaat acttctaacc aggttgctgt tctttatcag |
| | 23401 | gatgttaact gcacagaagt ccctgttgct attcatgcag atcaacttac tcctacttgg |
| | 23461 | cgtgtttatt ctacaggttc taatgttttt caaacacgtg caggctgttt aataggggct |
| | 23521 | gaacatgtca acaactcata tgagtgtgac atacccattg gtgcaggtat atgcgctagt |
| | 23581 | tatcagactc agactaattc tcctcggcgg gcacgtagtg tagctagtca atccatcatt |
| | 23641 | gcctacacta tgtcacttgg tgcagaaaat tcagttgctt actctaataa ctctattgcc |
| | 23701 | atacccacaa attttactat tagtgttacc acagaaattc taccagtgtc tatgaccaag |
| | 23761 | acatcagtag attgtacaat gtacatttgt ggtgattcaa ctgaatgcag caatcttttg |
| | 23821 | ttgcaatatg gcagtttttg tacacaatta aaccgtgctt taactggaat agctgttgaa |
| | 23881 | caagacaaaa acacccaaga agtttttgca caagtcaaac aaatttacaa aacaccacca |
| | 23941 | attaaagatt ttggtggttt taatttttca caaatattac cagatccatc aaaaccaagc |
| | 24001 | aagaggtcat ttattgaaga tctacttttc aacaaagtga cacttgcaga tgctggcttc |
| | 24061 | atcaaacaat atggtgattg ccttggtgat attgctgcta gagacctcat ttgtgcacaa |
| | 24121 | aagtttaacg gccttactgt tttgccacct ttgctcacag atgaaatgat tgctcaatac |
| | 24181 | acttctgcac tgttagcggg tacaatcact tctggttgga cctttggtgc aggtgctgca |
| | 24241 | ttacaaatac catttgctat gcaaatggct tataggttta atggtattgg agttacacag |
| | 24301 | aatgttctct atgagaacca aaaattgatt gccaaccaat ttaatagtgc tattggcaaa |
| | 24361 | attcaagact cactttcttc cacagcaagt gcacttggaa aacttcaaga tgtggtcaac |
| | 24421 | caaaatgcac aagctttaaa cacgcttgtt aaacaactta gctccaattt tggtgcaatt |
| | 24481 | tcaagtgttt taaatgatat cctttcacgt cttgacaaag ttgaggctga agtgcaaatt |
| | 24541 | gataggttga tcacaggcag acttcaaagt ttgcagacat atgtgactca acaattaatt |
| | 24601 | agagctgcag aaatcagagc ttctgctaat cttgctgcta ctaaaatgtc agagtgtgta |
| | 24661 | cttggacaat caaaaagagt tgatttttgt ggaaagggct atcatcttat gtccttccct |
| | 24721 | cagtcagcac ctcatggtgt agtcttcttg catgtgactt atgtccctgc acaagaaaag |
| | 24781 | aacttcacaa ctgctcctgc catttgtcat gatggaaaag cacactttcc tcgtgaaggt |
| | 24841 | gtctttgttt caaatggcac acactggttt gtaacacaaa ggaattttta tgaaccacaa |
| | 24901 | atcattacta cagacaacac atttgtgtct ggtaactgtg atgttgtaat aggaattgtc |
| | 24961 | aacaacacag tttatgatcc tttgcaacct gaattagact cattcaagga ggagttagat |
| | 25021 | aaatatttta agaatcatac atcaccagat gttgatttag gtgacatctc tggcattaat |
| | 25081 | gcttcagttg taaacattca aaaagaaatt gaccgcctca atgaggttgc caagaattta |
| | 25141 | aatgaatctc tcatcgatct ccaagaactt ggaaagtatg agcagtatat aaaatggcca |
| | 25201 | tggtacattt ggctaggttt tatagctggc ttgattgcca tagtaatggt gacaattatg |
| | 25261 | ctttgctgta tgaccagttg ctgtagttgt ctcaagggct gttgttcttg tggatcctgc |
| | 25321 | tgcaaatttg atgaagacga ctctgagcca gtgctcaaag gagtcaaatt acattacaca |
| | 25381 | taaacgaact tatggatttg tttatgagaa tcttcacaat tggaactgta actttgaagc |
| | 25441 | aaggtgaaat caaggatgct actccttcag attttgttcg cgctactgca acgataccga |
| | 25501 | tacaagcctc actccctttc ggatggctta ttgttggcgt tgcacttctt gctgtttttc |
| | 25561 | agagcgcttc caaaatcata accctcaaaa agagatggca actagcactc tccaagggtg |
| | 25621 | ttcactttgt ttgcaacttg ctgttgttgt ttgtaacagt ttactcacac cttttgctcg |
| | 25681 | ttgctgctgg ccttgaagcc ccttttctct atctttatgc tttagtctac ttcttgcaga |
| | 25741 | gtataaactt tgtaagaata ataatgaggc tttggctttg ctggaaatgc cgttccaaaa |
| | 25801 | acccattact ttatgatgcc aactattttc tttgctggca tactaattgt tacgactatt |
| | 25861 | gtatacctta caatagtgta acttcttcaa ttgtcattac ttcaggtgat ggcacaacaa |
| | 25921 | gtcctatttc tgaacatgac taccagattg gtggttatac tgaaaaatgg gaatctggag |
| | 25981 | taaaagactg tgttgtatta cacagttact tcacttcaga ctattaccag ctgtactcaa |
| | 26041 | ctcaattgag tacagacact ggtgttgaac atgttacctt cttcatctac aataaaattg |
| | 26101 | ttgatgagcc tgaagaacat gtccaaattc acacaatcga cggttcatcc ggagttgtta |
| | 26161 | atccagtaat ggaaccaatt tatgatgaac cgacgacgac tactagcgtg cctttgtaag |
| | 26221 | cacaagctga tgagtacgaa cttatgtact cattcgtttc ggaagagaca ggtacgttaa |
| | 26281 | tagttaatag cgtacttctt tttcttgctt tcgtggtatt cttgctagtt acactagcca |
| | 26341 | tccttactgc gcttcgattg tgtgcgtact gctgcaatat tgttaacgtg agtcttgtaa |
| | 26401 | aaccttcttt ttacgtttac tctcgtgtta aaaatctgaa ttcttctaga gttcctgatc |
| | 26461 | ttctggtcta aacgaactaa atattatatt agtttttctg tttggaactt taattttagc |
| | 26521 | catggcagat tccaacggta ctattaccgt tgaagagctt aaaaagctcc ttgaacaatg |
| | 26581 | gaacctagta ataggtttcc tattccttac atggatttgt cttctacaat ttgcctatgc |
| | 26641 | caacaggaat aggtttttgt atataattaa gttaattttc ctctggctgt tatggccagt |
| | 26701 | aactttagct tgttttgtgc ttgctgctgt ttacagaata aattggatca ccggtggaat |
| | 26761 | tgctatcgca atggcttgtc ttgtaggctt gatgtggctc agctacttca ttgcttcttt |
| | 26821 | cagactgttt gcgcgtacgc gttccatgtg gtcattcaat ccagaaacta acattcttct |
| | 26881 | caacgtgcca ctccatggca ctattctgac cagaccgctt ctagaaagtg aactcgtaat |
| | 26941 | cggagctgtg atccttcgtg gacatcttcg tattgctgga caccatctag gacgctgtga |
| | 27001 | catcaaggac ctgcctaaag aaatcactgt tgctacatca cgaacgcttt cttattacaa |
| | 27061 | attgggagct tcgcagcgtg tagcaggtga ctcaggtttt gctgcataca gtcgctacag |
| | 27121 | gattggcaac tataaattaa acacagacca ttccagtagc agtgacaata ttgctttgct |
| | 27181 | tgtacagtaa gtgacaacag atgtttcatc tcgttgactt tcaggttact atagcagaga |
| | 27241 | tattactaat tattatgagg acttttaaag tttccatttg gaatcttgat tacatcataa |
| | 27301 | acctcataat taaaaattta tctaagtcac taactgagaa taaatattct caattagatg |
| | 27361 | aagagcaacc aatggagatt gattaaacga acatgaaaat tattcttttc ttggcactga |
| | 27421 | taacactcgc tacttgtgag ctttatcact accaagagtg tgttagaggt acaacagtac |
| | 27481 | ttttaaaaga accttgctct tctggaacat acgagggcaa ttcaccattt catcctctag |
| | 27541 | ctgataacaa atttgcactg acttgcttta gcactcaatt tgcttttgct tgtcctgacg |
| | 27601 | gcgtaaaaca cgtctatcag ttacgtgcca gatcagtttc acctaaactg ttcatcagac |
| | 27661 | aagaggaagt tcaagaactt tactctccaa tttttcttat tgttgcggca atagtgttta |
| | 27721 | taacactttg cttcacactc aaaagaaaga cagaatgatt gaactttcat taattgactt |
| | 27781 | ctatttgtgc tttttagcct ttctgctatt ccttgtttta attatgctta ttatcttttg |
| | 27841 | gttctcactt gaactgcaag atcataatga aacttgtcac gcctaaacga acatgaaatt |
| | 27901 | tcttgttttc ttaggaatca tcacaactgt agctgcattt caccaagaat gtagtttaca |
| | 27961 | gtcatgtact caacatcaac catatgtagt tgatgacccg tgtcctattc acttctattc |
| | 28021 | taaatggtat attagagtag gagctagaaa atcagcacct ttaattgaat tgtgcgtgga |
| | 28081 | tgaggctggt tctaaatcac ccattcagta catcgatatc ggtaattata cagtttcctg |
| | 28141 | tttacctttt acaattaatt gccaggaacc taaattgggt agtcttgtag tgcgttgttc |
| | 28201 | gttctatgaa gactttttag agtatcatga cgttcgtgtt gttttagatt tcatctaaac |
| | 28261 | gaacaaacta aaatgtctga taatggaccc caaaatcagc gaaatgcacc ccgcattacg |
| | 28321 | tttggtggac cctcagattc aactggcagt aaccagaatg gagaacgcag tggggcgcga |
| | 28381 | tcaaaacaac gtcggcccca aggtttaccc aataatactg cgtcttggtt caccgctctc |
| | 28441 | actcaacatg gcaaggaaga ccttaaattc cctcgaggac aaggcgttcc aattaacacc |
| | 28501 | aatagcagtc cagatgacca aattggctac taccgaagag ctaccagacg aattcgtggt |
| | 28561 | ggtgacggta aaatgaaaga tctcagtcca agatggtatt tctactacct aggaactggg |
| | 28621 | ccagaagctg gacttcccta tggtgctaac aaagacggca tcatatgggt tgcaactgag |
| | 28681 | ggagccttga atacaccaaa agatcacatt ggcacccgca atcctgctaa caatgctgca |
| | 28741 | atcgtgctac aacttcctca aggaacaaca ttgccaaaag gcttctacgc agaagggagc |
| | 28801 | agaggcggca gtcaagcctc ttctcgttcc tcatcacgta gtcgcaacag ttcaagaaat |
| | 28861 | tcaactccag gcagcagtag gggaacttct cctgctagaa tggctggcaa tggcggtgat |
| | 28921 | gctgctcttg ctttgctgct gcttgacaga ttgaaccagc ttgagagcaa aatgtctggt |
| | 28981 | aaaggccaac aacaacaagg ccaaactgtc actaagaaat ctgctgctga ggcttctaag |
| | 29041 | aagcctcggc aaaaacgtac tgccactaaa gcatacaatg taacacaagc tttcggcaga |
| | 29101 | cgtggtccag aacaaaccca aggaaatttt ggggaccagg aactaatcag acaaggaact |
| | 29161 | gattacaaac attggccgca aattgcacaa tttgccccca gcgcttcagc gttcttcgga |
| | 29221 | atgtcgcgca ttggcatgga agtcacacct tcgggaacgt ggttgaccta cacaggtgcc |
| | 29281 | atcaaattgg atgacaaaga tccaaatttc aaagatcaag tcattttgct gaataagcat |
| | 29341 | attgacgcat acaaaacatt cccaccaaca gagcctaaaa aggacaaaaa gaagaaggct |
| | 29401 | gatgaaactc aagccttacc gcagagacag aagaaacagc aaactgtgac tcttcttcct |
| | 29461 | gctgcagatt tggatgattt ctccaaacaa ttgcaacaat ccatgagcag tgctgactca |
| | 29521 | actcaggcct aaactcatgc agaccacaca aggcagatgg gctatataaa cgttttcgct |
| | 29581 | tttccgttta cgatatatag tctactcttg tgcagaatga attctcgtaa ctacatagca |
| | 29641 | caagtagatg tagttaactt taatctcaca tagcaatctt taatcagtgt gtaacattag |
| | 29701 | ggaggacttg aaagagccac cacattttca ccgaggccac gcggagtacg atcgagtgta |
| | 29761 | cagtgaacaa tgctagggag agctgcctat atggaagagc cctaatgtgt aaaattaatt |
| | 29821 | ttagtagtgc tatccccatg tgattttaat agcttcttag gagaatgaca aaaaaaaaaa |
| | 29881 | a |
| Amino acid sequence of | 1 | MFVFLVLLPL VSSQCVNLTT RTQLPPAYTN SFTRGVYYPD KVFRSSVLHS TQDLFLPFFS NVTWFHAIHV SGTNGTKRFD |
| the S protein from | 81 | NPVLPFNDGV YFASTEKSNI IRGWIFGTTL DSKTQSLLIV NNATNVVIKV CEFQFCNDPF LGVYYHKNNK SWMESEFRVY |
| MN988668 Accession | 161 | SSANNCTFEY VSQPFLMDLE GKQGNFKNLR EFVFKNIDGY FKIYSKHTPI NLVRDLPQGF SALEPLVDLP IGINITRFQT |
| number. SEQ ID NO: 47 | 241 | LLALHRSYLT PGDSSSGWTA GAAAYYVGYL QPRTFLLKYN ENGTITDAVD CALDPLSETK CTLKSFTVEK GIYQTSNFRV |
| | 321 | QPTESIVRFP NITNLCPFGE VFNATRFASV YAWNRKRISN CVADYSVLYN SASFSTFKCY GVSPTKLNDL CFTNVYADSF |
| | 401 | VIRGDEVRQI APGQTGKIAD YNYKLPDDFT GCVIAWNSNN LDSKVGGNYN YLYRLFRKSN LKPFERDIST EIYQAGSTPC |
| | 481 | NGVEGFNCYF PLQSYGFQPT NGVGYQPYRV VVLSFELLHA PATVCGPKKS TNLVKNKCVN FNFNGLTGTG VLTESNKKFL |
| | 561 | PFQQFGRDIA DTTDAVRDPQ TLEILDITPC SFGGVSVITP GTNTSNQVAV LYQDVNCTEV PVAIHADQLT PTWRVYSTGS |
| | 641 | NVFQTRAGCL IGAEHVNNSY ECDIPIGAGI CASYQTQTNS PRRARSVASQ SIIAYTMSLG AENSVAYSNN SIAIPTNFTI |
| | 721 | SVTTEILPVS MTKTSVDCTM YICGDSTECS NLLLQYGSFC TQLNRALTGI AVEQDKNTQE VFAQVKQIYK TPPIKDFGGF |
| | 801 | NFSQILPDPS KPSKRSFIED LLFNKVTLAD AGFIKQYGDC LGDIAARDLI CAQKFNGLTV LPPLLTDEMI AQYTSALLAG |
| | 881 | TITSGWTFGA GAALQIPFAM QMAYRFNGIG VTQNVLYENQ KLIANQFNSA IGKIQDSLSS TASALGKLQD VVNQNAQALN |
| | 961 | TLVKQLSSNF GAISSVLNDI LSRLDKVEAE VQIDRLITGR LQSLQTYVTQ QLIRAAEIRA SANLAATKMS ECVLGQSKRV |
| | 1041 | DFCGKGYHLM SFPQSAPHGV VFLHVTYVPA QEKNFTTAPA ICHDGKAHFP REGVFVSNGT HWFVTQRNFY EPQIITTDNT |
| | 1121 | FVSGNCDVVI GIVNNTVYDP LQPELDSFKE ELDKYFKNHT SPDVDLGDIS GINASVVNIQ KEIDRLNEVA KNLNESLIDL |
| | 1201 | QELGKYEQYI KWPWYIWLGF IAGLIAIVMV TIMLCCMTSC CSCLKGCCSC GSCCKFDEDD SEPVLKGVKL HYT |
| Amino acid sequence of | MADSNGTITVEELKKLLEQWNLVIGFLFLTWICLLQFAYANRNR | |
| the M protein from | FLYIIKLIFLWLLWPVTLACFVLAAVYRINWITGGIAIAMACLVGLMWLSYFIASFRL | |
| MN988668 Accession | FARTRSMWSFNPETNILLNVPLHGTILTRPLLESELVIGAVILRGHLRIAGHHLGRCD | |
| number. SEQ ID NO: 48 | IKDLPKEITVATSRTLSYYKLGASQRVAGDSGFAAYSRYRIGNYKLNTDHSSSSDNIA | |
| | LLVQ | |
| Amino acid sequence of | MSDNGPQNQRNAPRITFGGPSDSTGSNQNGERSGARSKQRRPQG | |
| the N protein from | LPNNTASWFTALTQHGKEDLKFPRGQGVPINTNSSPDDQIGYYRRATRRIRGGDGKMK | |
| MN988668 Accession | DLSPRWYFYYLGTGPEAGLPYGANKDGIIWVATEGALNTPKDHIGTRNPANNAAIVLQ | |
| number. SEQ ID NO: 49 | LPQGTTLPKGFYAEGSRGGSQASSRSSSRSRNSSRNSTPGSSRGTSPARMAGNGGDAA | |
| | LALLLLDRLNQLESKMSGKGQQQQGQTVTKKSAAEASKKPRQKRTATKAYNVTQAFGR | |
| | RGPEQTQGNFGDQELIRQGTDYKHWPQIAQFAPSASAFFGMSRIGMEVTPSGTWLTYT | |
| | GAIKLDDKDPNFKDQVILLNKHIDAYKTFPPTEPKKDKKKKADETQALPQRQKKQQTV | |
| | TLLPAADLDDFSKQLQQSMSSADSTQA | |
| Nucleotide sequence | aGCGGCCGCaaaattgaaattttattttttttttttggaatataaataATGTTCGTGTT | |
| of SARS-CoV-2-Spike-co | CCTAGTCCTACTACCGCTAGT | |
| (codon-optimized | CTCTTCCCAGTGTGTAAACCTAACAACGAGAACACAACTACCACCGGCGTACACCAATT | |
| for VACV expression). | CTTTCACAAGAGGAGTATATT | |
| SEQ ID NO: 50 | ACCCGGACAAGGTGTTCAGATCCTCCGTACTACATTCTACCCAGGACCTATTCCTACCG | |
| | TTCTTCTCTAACGTAACATGG | |
| | TTCCACGCGATCCATGTCTCTGGAACAAACGGAACGAAGAGATTCGATAACCCGGTCTT | |
| | GCCGTTCAACGATGGTGTATA | |
| | CTTTGCGTCCACCGAGAAGTCCAACATCATCAGAGGATGGATCTTCGGAACCACCTTGG | |
| | ATTCTAAGACCCAGTCCTTGC | |
| | TAATCGTCAACAACGCGACCAACGTCGTCATCAAAGTCTGCGAATTCCAGTTCTGTAAC | |
| | GACCCGTTTTTGGGAGTCTAC | |
| | TACCACAAGAACAACAAGTCCTGGATGGAATCCGAGTTCAGAGTCTACTCTTCCGCGAA | |
| | CAACTGCACCTTCGAATATGT | |
| | ATCTCAGCCGTTCCTAATGGACCTAGAGGGAAAGCAGGGAAACTTCAAGAACCTAAGAG | |
| | AGTTCGTATTCAAGAACATCG | |
| | ACGGATACTTCAAGATCTACTCCAAGCACACCCCGATCAACCTAGTTAGAGATCTACCG | |
| | CAAGGATTCTCTGCGCTAGAA | |
| | CCGTTAGTAGATTTGCCGATCGGAATCAACATCACCAGATTCCAGACACTACTAGCGCT | |
| | ACACAGATCTTACCTAACGCC | |
| | GGGAGATTCTTCTTCTGGATGGACTGCTGGTGCTGCGGCTTATTATGTAGGATACCTAC | |
| | AGCCGAGAACCTTCCTATTGA | |
| | AGTACAACGAAAACGGAACCATCACCGATGCCGTAGATTGTGCTCTAGATCCGCTATCC | |
| | GAAACGAAGTGCACCCTAAAG | |
| | TCTTTCACCGTCGAGAAGGGAATCTACCAGACCTCCAACTTTAGAGTACAGCCGACCGA | |
| | ATCCATCGTCAGATTTCCGAA | |
| | CATCACGAACCTATGTCCGTTCGGAGAAGTGTTCAACGCGACAAGATTTGCGTCTGTCT | |
| | ATGCGTGGAACAGAAAAAGAA | |
| | TCAGTAACTGCGTCGCGGACTACTCCGTCCTATACAACTCTGCCTCTTTCTCCACGTTC | |
| | AAATGCTACGGTGTATCCCCG | |
| | ACAAAGCTAAACGATCTATGCTTCACCAACGTCTACGCGGACTCCTTCGTAATCAGAGG | |
| | AGATGAAGTTAGACAGATTGC | |
| | GCCGGGACAAACTGGAAAGATCGCGGATTATAACTACAAGCTACCGGACGACTTCACCG | |
| | GATGTGTAATTGCGTGGAATT | |
| | CGAACAACCTAGACTCCAAAGTCGGAGGAAACTACAACTACTTGTACAGACTATTCAGA | |
| | AAGTCCAACCTAAAGCCGTTC | |
| | GAGAGAGACATCTCCACCGAAATCTATCAGGCTGGATCTACACCGTGTAATGGTGTCGA | |
| | AGGATTCAACTGCTACTTCCC | |
| | GCTACAGTCTTACGGATTTCAACCGACAAACGGTGTAGGATATCAGCCGTACAGAGTCG | |
| | TCGTACTATCCTTCGAACTAC | |
| | TACATGCTCCGGCGACAGTATGTGGACCGAAAAAGTCTACCAACCTAGTCAAGAACAAA | |
| | TGCGTCAACTTTAACTTCAAC | |
| | GGACTAACCGGAACCGGTGTCCTAACCGAATCTAACAAGAAGTTTCTACCGTTCCAGCA | |
| | GTTCGGAAGAGATATCGCGGA | |
| | TACAACAGACGCTGTCAGAGATCCGCAAACCTTGGAGATCCTAGATATCACCCCGTGTT | |
| | CTTTCGGTGGTGTCTCTGTAA | |
| | TTACTCCGGGAACGAACACCTCCAATCAAGTAGCGGTACTATACCAGGACGTGAACTGT | |
| | ACAGAAGTACCGGTAGCTATT | |
| | CACGCGGATCAACTAACACCAACTTGGAGAGTGTACTCCACCGGATCTAACGTATTCCA | |
| | AACAAGAGCGGGATGTCTAAT | |
| | CGGAGCGGAACACGTAAACAACTCCTACGAATGTGATATCCCGATTGGAGCGGGAATCT | |
| | GTGCGTCTTACCAAACACAAA | |
| | CAAACTCCCCGAGAAGAGCGAGATCTGTAGCCTCTCAATCTATTATCGCCTACACCATG | |
| | TCCTTGGGAGCCGAAAATTCT | |
| | GTCGCGTACTCCAACAATTCTATCGCGATCCCGACAAACTTCACCATCTCTGTAACAAC | |
| | CGAGATCCTACCGGTGTCTAT | |
| | GACCAAGACATCTGTCGATTGCACCATGTACATCTGCGGAGATTCCACCGAGTGCTCCA | |
| | ACCTACTACTACAGTACGGAT | |
| | CTTTCTGTACCCAGCTAAACAGAGCGTTGACTGGAATCGCTGTAGAGCAGGATAAGAAC | |
| | ACCCAAGAGGTATTCGCGCAA | |
| | GTCAAGCAGATCTATAAGACTCCGCCGATCAAGGACTTCGGAGGTTTTAACTTCTCTCA | |
| | GATCTTGCCGGATCCGTCCAA | |
| | ACCGTCTAAGAGATCTTTCATCGAGGACCTACTATTCAACAAAGTCACCCTAGCTGACG | |
| | CGGGATTCATCAAACAATACG | |
| | GAGATTGCTTGGGAGACATTGCGGCGAGAGATCTAATTTGCGCGCAGAAGTTTAACGGA | |
| | TTGACAGTACTACCGCCGCTA | |
| | CTAACCGATGAGATGATTGCGCAGTACACGTCTGCTCTATTGGCGGGAACAATTACAAG | |
| | TGGATGGACATTTGGAGCCGG | |
| | TGCCGCTCTACAAATTCCGTTTGCTATGCAAATGGCGTACAGATTCAACGGAATCGGAG | |
| | TAACCCAGAACGTCTTGTACG | |
| | AGAACCAGAAGCTAATCGCGAACCAGTTCAATTCCGCGATCGGAAAGATCCAGGACAGT | |
| | CTATCTTCTACTGCTTCGGCG | |
| | TTGGGAAAGCTACAGGATGTAGTAAATCAAAACGCGCAGGCGCTAAACACCTTGGTCAA | |
| | GCAACTATCCTCTAACTTCGG | |
| | AGCGATCTCGTCCGTCCTAAACGACATCTTATCCAGACTAGATAAGGTCGAAGCGGAGG | |
| | TCCAGATCGATAGACTAATCA | |
| | CTGGAAGATTGCAGTCCCTACAGACCTACGTAACACAGCAACTAATTAGAGCGGCGGAG | |
| | ATTAGAGCCTCTGCTAATCTA | |
| | GCTGCGACCAAGATGTCCGAATGTGTCTTGGGACAATCCAAGAGAGTCGACTTTTGCGG | |
| | AAAGGGATACCACCTAATGTC | |
| | TTTTCCACAATCTGCGCCGCATGGTGTCGTATTCCTACATGTAACATATGTGCCGGCGC | |
| | AAGAAAAGAACTTTACAACAG | |
| | CTCCAGCGATCTGCCATGATGGAAAAGCTCATTTTCCGAGAGAGGGAGTCTTTGTCTCT | |
| | AACGGAACTCATTGGTTCGTC | |
| | ACCCAGAGAAACTTTTACGAGCCGCAGATCATCACCACCGACAACACATTTGTTTCGGG | |
| | AAACTGCGACGTGGTCATCGG | |
| | AATCGTAAACAATACCGTCTACGATCCGTTGCAGCCGGAACTAGACTCCTTCAAAGAAG | |
| | AGTTGGACAAGTACTTTAAGA | |
| | ACCACACCTCTCCGGATGTCGACTTGGGAGATATTTCTGGAATCAACGCGTCCGTCGTC | |
| | AACATCCAGAAAGAAATCGAT | |
| | AGATTGAACGAGGTCGCGAAGAACTTGAACGAGTCCCTAATCGACCTACAAGAGCTAGG | |
| | AAAATACGAGCAGTACATCAA | |
| | GTGGCCGTGGTACATTTGGCTAGGATTCATTGCTGGACTAATTGCGATCGTCATGGTCA | |
| | CCATCATGCTATGCTGTATGA | |
| | CCTCCTGTTGCTCCTGTCTAAAGGGATGTTGTTCCTGCGGATCCTGTTGCAAGTTCGAT | |
| | GAAGATGATAGTGAACCGGTC | |
| | CTAAAGGGTGTCAAGCTACACTACACATAAAAGCTT | |
| Nucleotide sequence of | tttggctagtcaagatgatgaatcttcattatctgatatattgcaaatcactcaatatc | |
| HPXV095 gene locus target | tagactttctgttattattat | |
| for SARS-CoV-2 Spike | tgatccaatcaaaaaataaattagaagccgtgggtcattgttatgaatctctttcagag | |
| insertion. SEQ ID NO: 51 | gaatacagacaattgacaaaa | |
| | ttcacagactttcaagattttaaaaaactgtttaacaaggtccctattgttacagatgg | |
| | aagggtcaaacttaataaagg | |
| | atatttgttcgactttgtgattagtttgatgcgattcaaaaaagaatcctctctagcta | |
| | ccaccgcaatagatcctatta | |
| | gatacatagatcctcgtcgtgatatcgcattttctaacgtgatggatatattaaagttg | |
| | aataaagtgaacaataattaa | |
| | ttctttattgtcatcGGATCCCACgatGTGctaGACtctctcGTCtacGCGGCCGCaAc | |
| | tgagagaccAAGCTTGTCGAC | |
| | tattatattttttatctaaaaaactaaaaataaacattgattaaattttaatataatac | |
| | ttaaaaatggatgttgtgtcg | |
| | ttagataaaccgtttatgtattttgaggaaattgataatgagttagattacgaaccaga | |
| | aagtgcaaatgaggtcgcaaa | |
| | aaaactaccgtatcaaggacagttaaaactattactaggagaattattttttcttagta | |
| | agttacagcgacacggtatat | |
| | tagatggtgccaccgtagtgtatataggatcggctcctggtacacatatacgttatttg | |
| | agagatcatttctataattta | |
| | ggaatgattatcaaatggatgctaattgacggacgccatcatgatcctattctaaatgg | |
| | attgcgtgatgtgactctagt | |
| Nucleotide sequence of | gagtattctaggtgtttctatagaatgtaagaagtcAtcgacattacttacttttttga | |
| HPXV200 gene locus target | ccgtgcgtaaaatgacCcgag | |
| for SARS-COV-2 Spike | tatttaatagatttccagatatggcttattatcgaggagactgtttaaaagccgtttat | |
| insertion. SEQ ID NO: 52 | gtaacaatgacttataaaaat | |
| | actaaaactggagagactgattacacgtacctctctaatgggggttgcctgcatactat | |
| | cgtaatggggtcgatggttga | |
| | ttattgattagtatattccttattctttttattcacacaaaaagaacatttttataaac | |
| | atgaaaccactgtctaaatgt | |
| | aattatgatcttgatttatagatgaagatcagcctttagaggattttaaccagtatgtt | |
| | taatatgaaaaaaataaacat | |
| | aacatattttgagattaagcgctattgtgcttaattattttgctctataaactgaatat | |
| | atagccacaattattgacggg | |
| | cttgtttatgaccggcaatcGGATCCCACgatGTGctaGACtctctcGTCtacGCGGCC | |
| | GCaActgagagaccAAGCTTG | |
| | TCGACtaaaatagtttaactcttttaaaaccagtttggtactggaatttcagttcatta | |
| | ctcgttgagaaattgatgatt | |
| | tttttaaaatgatattacttttatatgcttgcatcgcagaatgatattcacaagtatta | |
| | ttaaaaatgagtatcggtagt | |
| | tacattaccatatcatccatgctcatatggatctccatccattatataatcaatgatac | |
| | atgtattaaaatactttccga | |
| | ataagtcttttaaatattgtattaattatgaaaaactatgctatgcgagtatgatgcaa | |
| | agatgtttaatgatacgatac | |
| | tagattttatctctagcgagagatgtcgttagaatcatttatcataactacgtttaata | |
| | ataattcatcaacgaatatcg | |
| | ataacatgtgtcatttatactttaaatacgttaaagtctgtccgtcttctctattgttt | |
| | agactgtttgtagaatgctgt | |
| | gatataaacaaactagtagaaggta | |
| Nucleotide sequence of | 1 | attaaaggtt tataccttcc caggtaacaa accaaccaac tttcgatctc ttgtagatct |
| SARS-CoV-2 Wuhan-Hu-1 | 61 | gttctctaaa cgaactttaa aatctgtgtg gctgtcactc ggctgcatgc ttagtgcact |
| (Accession NC_045512.2). | 121 | cacgcagtat aattaataac taattactgt cgttgacagg acacgagtaa ctcgtctatc |
| SEQ ID NO: 53 | 181 | ttctgcaggc tgcttacggt ttcgtccgtg ttgcagccga tcatcagcac atctaggttt |
| | 241 | cgtccgggtg tgaccgaaag gtaagatgga gagccttgtc cctggtttca acgagaaaac |
| | 301 | acacgtccaa ctcagtttgc ctgttttaca ggttcgcgac gtgctcgtac gtggctttgg |
| | 361 | agactccgtg gaggaggtct tatcagaggc acgtcaacat cttaaagatg gcacttgtgg |
| | 421 | cttagtagaa gttgaaaaag gcgttttgcc tcaacttgaa cagccctatg tgttcatcaa |
| | 481 | acgttcggat gctcgaactg cacctcatgg tcatgttatg gttgagctgg tagcagaact |
| | 541 | cgaaggcatt cagtacggtc gtagtggtga gacacttggt gtccttgtcc ctcatgtggg |
| | 601 | cgaaatacca gtggcttacc gcaaggttct tcttcgtaag aacggtaata aaggagctgg |
| | 661 | tggccatagt tacggcgccg atctaaagtc atttgactta ggcgacgagc ttggcactga |
| | 721 | tccttatgaa gattttcaag aaaactggaa cactaaacat agcagtggtg ttacccgtga |
| | 781 | actcatgcgt gagcttaacg gaggggcata cactcgctat gtcgataaca acttctgtgg |
| | 841 | ccctgatggc taccctcttg agtgcattaa agaccttcta gcacgtgctg gtaaagcttc |
| | 901 | atgcactttg tccgaacaac tggactttat tgacactaag aggggtgtat actgctgccg |
| | 961 | tgaacatgag catgaaattg cttggtacac ggaacgttct gaaaagagct atgaattgca |
| | 1021 | gacacctttt gaaattaaat tggcaaagaa atttgacacc ttcaatgggg aatgtccaaa |
| | 1081 | ttttgtattt cccttaaatt ccataatcaa gactattcaa ccaagggttg aaaagaaaaa |
| | 1141 | gcttgatggc tttatgggta gaattcgatc tgtctatcca gttgcgtcac caaatgaatg |
| | 1201 | caaccaaatg tgcctttcaa ctctcatgaa gtgtgatcat tgtggtgaaa cttcatggca |
| | 1261 | gacgggcgat tttgttaaag ccacttgcga attttgtggc actgagaatt tgactaaaga |
| | 1321 | aggtgccact acttgtggtt acttacccca aaatgctgtt gttaaaattt attgtccagc |
| | 1381 | atgtcacaat tcagaagtag gacctgagca tagtcttgcc gaataccata atgaatctgg |
| | 1441 | cttgaaaacc attcttcgta agggtggtcg cactattgcc tttggaggct gtgtgttctc |
| | 1501 | ttatgttggt tgccataaca agtgtgccta ttgggttcca cgtgctagcg ctaacatagg |
| | 1561 | ttgtaaccat acaggtgttg ttggagaagg ttccgaaggt cttaatgaca accttcttga |
| | 1621 | aatactccaa aaagagaaag tcaacatcaa tattgttggt gactttaaac ttaatgaaga |
| | 1681 | gatcgccatt attttggcat ctttttctgc ttccacaagt gcttttgtgg aaactgtgaa |
| | 1741 | aggtttggat tataaagcat tcaaacaaat tgttgaatcc tgtggtaatt ttaaagttac |
| | 1801 | aaaaggaaaa gctaaaaaag gtgcctggaa tattggtgaa cagaaatcaa tactgagtcc |
| | 1861 | tctttatgca tttgcatcag aggctgctcg tgttgtacga tcaattttct cccgcactct |
| | 1921 | tgaaactgct caaaattctg tgcgtgtttt acagaaggcc gctataacaa tactagatgg |
| | 1981 | aatttcacag tattcactga gactcattga tgctatgatg ttcacatctg atttggctac |
| | 2041 | taacaatcta gttgtaatgg cctacattac aggtggtgtt gttcagttga cttcgcagtg |
| | 2101 | gctaactaac atctttggca ctgtttatga aaaactcaaa cccgtccttg attggcttga |
| | 2161 | agagaagttt aaggaaggtg tagagtttct tagagacggt tgggaaattg ttaaatttat |
| | 2221 | ctcaacctgt gcttgtgaaa ttgtcggtgg acaaattgtc acctgtgcaa aggaaattaa |
| | 2281 | ggagagtgtt cagacattct ttaagcttgt aaataaattt ttggctttgt gtgctgactc |
| | 2341 | tatcattatt ggtggagcta aacttaaagc cttgaattta ggtgaaacat ttgtcacgca |
| | 2401 | ctcaaaggga ttgtacagaa agtgtgttaa atccagagaa gaaactggcc tactcatgcc |
| | 2461 | tctaaaagcc ccaaaagaaa ttatcttctt agagggagaa acacttccca cagaagtgtt |
| | 2521 | aacagaggaa gttgtcttga aaactggtga tttacaacca ttagaacaac ctactagtga |
| | 2581 | agctgttgaa gctccattgg ttggtacacc agtttgtatt aacgggctta tgttgctcga |
| | 2641 | aatcaaagac acagaaaagt actgtgccct tgcacctaat atgatggtaa caaacaatac |
| | 2701 | cttcacactc aaaggcggtg caccaacaaa ggttactttt ggtgatgaca ctgtgataga |
| | 2761 | agtgcaaggt tacaagagtg tgaatatcac ttttgaactt gatgaaagga ttgataaagt |
| | 2821 | acttaatgag aagtgctctg cctatacagt tgaactcggt acagaagtaa atgagttcgc |
| | 2881 | ctgtgttgtg gcagatgctg tcataaaaac tttgcaacca gtatctgaat tacttacacc |
| | 2941 | actgggcatt gatttagatg agtggagtat ggctacatac tacttatttg atgagtctgg |
| | 3001 | tgagtttaaa ttggcttcac atatgtattg ttctttctac cctccagatg aggatgaaga |
| | 3061 | agaaggtgat tgtgaagaag aagagtttga gccatcaact caatatgagt atggtactga |
| | 3121 | agatgattac caaggtaaac ctttggaatt tggtgccact tctgctgctc ttcaacctga |
| | 3181 | agaagagcaa gaagaagatt ggttagatga tgatagtcaa caaactgttg gtcaacaaga |
| | 3241 | cggcagtgag gacaatcaga caactactat tcaaacaatt gttgaggttc aacctcaatt |
| | 3301 | agagatggaa cttacaccag ttgttcagac tattgaagtg aatagtttta gtggttattt |
| | 3361 | aaaacttact gacaatgtat acattaaaaa tgcagacatt gtggaagaag ctaaaaaggt |
| | 3421 | aaaaccaaca gtggttgtta atgcagccaa tgtttacctt aaacatggag gaggtgttgc |
| | 3481 | aggagcctta aataaggcta ctaacaatgc catgcaagtt gaatctgatg attacatagc |
| | 3541 | tactaatgga ccacttaaag tgggtggtag ttgtgtttta agcggacaca atcttgctaa |
| | 3601 | acactgtctt catgttgtcg gcccaaatgt taacaaaggt gaagacattc aacttcttaa |
| | 3661 | gagtgcttat gaaaatttta atcagcacga agttctactt gcaccattat tatcagctgg |
| | 3721 | tatttttggt gctgacccta tacattcttt aagagtttgt gtagatactg ttcgcacaaa |
| | 3781 | tgtctactta gctgtctttg ataaaaatct ctatgacaaa cttgtttcaa gctttttgga |
| | 3841 | aatgaagagt gaaaagcaag ttgaacaaaa gatcgctgag attcctaaag aggaagttaa |
| | 3901 | gccatttata actgaaagta aaccttcagt tgaacagaga aaacaagatg ataagaaaat |
| | 3961 | caaagcttgt gttgaagaag ttacaacaac tctggaagaa actaagttcc tcacagaaaa |
| | 4021 | cttgttactt tatattgaca ttaatggcaa tcttcatcca gattctgcca ctcttgttag |
| | 4081 | tgacattgac atcactttct taaagaaaga tgctccatat atagtgggtg atgttgttca |
| | 4141 | agagggtgtt ttaactgctg tggttatacc tactaaaaag gctggtggca ctactgaaat |
| | 4201 | gctagcgaaa gctttgagaa aagtgccaac agacaattat ataaccactt acccgggtca |
| | 4261 | gggtttaaat ggttacactg tagaggaggc aaagacagtg cttaaaaagt gtaaaagtgc |
| | 4321 | cttttacatt ctaccatcta ttatctctaa tgagaagcaa gaaattcttg gaactgtttc |
| | 4381 | ttggaatttg cgagaaatgc ttgcacatgc agaagaaaca cgcaaattaa tgcctgtctg |
| | 4441 | tgtggaaact aaagccatag tttcaactat acagcgtaaa tataagggta ttaaaataca |
| | 4501 | agagggtgtg gttgattatg gtgctagatt ttacttttac accagtaaaa caactgtagc |
| | 4561 | gtcacttatc aacacactta acgatctaaa tgaaactctt gttacaatgc cacttggcta |
| | 4621 | tgtaacacat ggcttaaatt tggaagaagc tgctcggtat atgagatctc tcaaagtgcc |
| | 4681 | agctacagtt tctgtttctt cacctgatgc tgttacagcg tataatggtt atcttacttc |
| | 4741 | ttcttctaaa acacctgaag aacattttat tgaaaccatc tcacttgctg gttcctataa |
| | 4801 | agattggtcc tattctggac aatctacaca actaggtata gaatttctta agagaggtga |
| | 4861 | taaaagtgta tattacacta gtaatcctac cacattccac ctagatggtg aagttatcac |
| | 4921 | ctttgacaat cttaagacac ttctttcttt gagagaagtg aggactatta aggtgtttac |
| | 4981 | aacagtagac aacattaacc tccacacgca agttgtggac atgtcaatga catatggaca |
| | 5041 | acagtttggt ccaacttatt tggatggagc tgatgttact aaaataaaac ctcataattc |
| | 5101 | acatgaaggt aaaacatttt atgttttacc taatgatgac actctacgtg ttgaggcttt |
| | 5161 | tgagtactac cacacaactg atcctagttt tctgggtagg tacatgtcag cattaaatca |
| | 5221 | cactaaaaag tggaaatacc cacaagttaa tggtttaact tctattaaat gggcagataa |
| | 5281 | caactgttat cttgccactg cattgttaac actccaacaa atagagttga agtttaatcc |
| | 5341 | acctgctcta caagatgctt attacagagc aagggctggt gaagctgcta acttttgtgc |
| | 5401 | acttatctta gcctactgta ataagacagt aggtgagtta ggtgatgtta gagaaacaat |
| | 5461 | gagttacttg tttcaacatg ccaatttaga ttcttgcaaa agagtcttga acgtggtgtg |
| | 5521 | taaaacttgt ggacaacagc agacaaccct taagggtgta gaagctgtta tgtacatggg |
| | 5581 | cacactttct tatgaacaat ttaagaaagg tgttcagata ccttgtacgt gtggtaaaca |
| | 5641 | agctacaaaa tatctagtac aacaggagtc accttttgtt atgatgtcag caccacctgc |
| | 5701 | tcagtatgaa cttaagcatg gtacatttac ttgtgctagt gagtacactg gtaattacca |
| | 5761 | gtgtggtcac tataaacata taacttctaa agaaactttg tattgcatag acggtgcttt |
| | 5821 | acttacaaag tcctcagaat acaaaggtcc tattacggat gttttctaca aagaaaacag |
| | 5881 | ttacacaaca accataaaac cagttactta taaattggat ggtgttgttt gtacagaaat |
| | 5941 | tgaccctaag ttggacaatt attataagaa agacaattct tatttcacag agcaaccaat |
| | 6001 | tgatcttgta ccaaaccaac catatccaaa cgcaagcttc gataatttta agtttgtatg |
| | 6061 | tgataatatc aaatttgctg atgatttaaa ccagttaact ggttataaga aacctgcttc |
| | 6121 | aagagagctt aaagttacat ttttccctga cttaaatggt gatgtggtgg ctattgatta |
| | 6181 | taaacactac acaccctctt ttaagaaagg agctaaattg ttacataaac ctattgtttg |
| | 6241 | gcatgttaac aatgcaacta ataaagccac gtataaacca aatacctggt gtatacgttg |
| | 6301 | tctttggagc acaaaaccag ttgaaacatc aaattcgttt gatgtactga agtcagagga |
| | 6361 | cgcgcaggga atggataatc ttgcctgcga agatctaaaa ccagtctctg aagaagtagt |
| | 6421 | ggaaaatcct accatacaga aagacgttct tgagtgtaat gtgaaaacta ccgaagttgt |
| | 6481 | aggagacatt atacttaaac cagcaaataa tagtttaaaa attacagaag aggttggcca |
| | 6541 | cacagatcta atggctgctt atgtagacaa ttctagtctt actattaaga aacctaatga |
| | 6601 | attatctaga gtattaggtt tgaaaaccct tgctactcat ggtttagctg ctgttaatag |
| | 6661 | tgtcccttgg gatactatag ctaattatgc taagcctttt cttaacaaag ttgttagtac |
| | 6721 | aactactaac atagttacac ggtgtttaaa ccgtgtttgt actaattata tgccttattt |
| | 6781 | ctttacttta ttgctacaat tgtgtacttt tactagaagt acaaattcta gaattaaagc |
| | 6841 | atctatgccg actactatag caaagaatac tgttaagagt gtcggtaaat tttgtctaga |
| | 6901 | ggcttcattt aattatttga agtcacctaa tttttctaaa ctgataaata ttataatttg |
| | 6961 | gtttttacta ttaagtgttt gcctaggttc tttaatctac tcaaccgctg ctttaggtgt |
| | 7021 | tttaatgtct aatttaggca tgccttctta ctgtactggt tacagagaag gctatttgaa |
| | 7081 | ctctactaat gtcactattg caacctactg tactggttct ataccttgta gtgtttgtct |
| | 7141 | tagtggttta gattctttag acacctatcc ttctttagaa actatacaaa ttaccatttc |
| | 7201 | atcttttaaa tgggatttaa ctgcttttgg cttagttgca gagtggtttt tggcatatat |
| | 7261 | tcttttcact aggtttttct atgtacttgg attggctgca atcatgcaat tgtttttcag |
| | 7321 | ctattttgca gtacatttta ttagtaattc ttggcttatg tggttaataa ttaatcttgt |
| | 7381 | acaaatggcc ccgatttcag ctatggttag aatgtacatc ttctttgcat cattttatta |
| | 7441 | tgtatggaaa agttatgtgc atgttgtaga cggttgtaat tcatcaactt gtatgatgtg |
| | 7501 | ttacaaacgt aatagagcaa caagagtcga atgtacaact attgttaatg gtgttagaag |
| | 7561 | gtccttttat gtctatgcta atggaggtaa aggcttttgc aaactacaca attggaattg |
| | 7621 | tgttaattgt gatacattct gtgctggtag tacatttatt agtgatgaag ttgcgagaga |
| | 7681 | cttgtcacta cagtttaaaa gaccaataaa tcctactgac cagtcttctt acatcgttga |
| | 7741 | tagtgttaca gtgaagaatg gttccatcca tctttacttt gataaagctg gtcaaaagac |
| | 7801 | ttatgaaaga cattctctct ctcattttgt taacttagac aacctgagag ctaataacac |
| | 7861 | taaaggttca ttgcctatta atgttatagt ttttgatggt aaatcaaaat gtgaagaatc |
| | 7921 | atctgcaaaa tcagcgtctg tttactacag tcagcttatg tgtcaaccta tactgttact |
| | 7981 | agatcaggca ttagtgtctg atgttggtga tagtgcggaa gttgcagtta aaatgtttga |
| | 8041 | tgcttacgtt aatacgtttt catcaacttt taacgtacca atggaaaaac tcaaaacact |
| | 8101 | agttgcaact gcagaagctg aacttgcaaa gaatgtgtcc ttagacaatg tcttatctac |
| | 8161 | ttttatttca gcagctcggc aagggtttgt tgattcagat gtagaaacta aagatgttgt |
| | 8221 | tgaatgtctt aaattgtcac atcaatctga catagaagtt actggcgata gttgtaataa |
| | 8281 | ctatatgctc acctataaca aagttgaaaa catgacaccc cgtgaccttg gtgcttgtat |
| | 8341 | tgactgtagt gcgcgtcata ttaatgcgca ggtagcaaaa agtcacaaca ttgctttgat |
| | 8401 | atggaacgtt aaagatttca tgtcattgtc tgaacaacta cgaaaacaaa tacgtagtgc |
| | 8461 | tgctaaaaag aataacttac cttttaagtt gacatgtgca actactagac aagttgttaa |
| | 8521 | tgttgtaaca acaaagatag cacttaaggg tggtaaaatt gttaataatt ggttgaagca |
| | 8581 | gttaattaaa gttacacttg tgttcctttt tgttgctgct attttctatt taataacacc |
| | 8641 | tgttcatgtc atgtctaaac atactgactt ttcaagtgaa atcataggat acaaggctat |
| | 8701 | tgatggtggt gtcactcgtg acatagcatc tacagatact tgttttgcta acaaacatgc |
| | 8761 | tgattttgac acatggttta gccagcgtgg tggtagttat actaatgaca aagcttgccc |
| | 8821 | attgattgct gcagtcataa caagagaagt gggttttgtc gtgcctggtt tgcctggcac |
| | 8881 | gatattacgc acaactaatg gtgacttttt gcatttctta cctagagttt ttagtgcagt |
| | 8941 | tggtaacatc tgttacacac catcaaaact tatagagtac actgactttg caacatcagc |
| | 9001 | ttgtgttttg gctgctgaat gtacaatttt taaagatgct tctggtaagc cagtaccata |
| | 9061 | ttgttatgat accaatgtac tagaaggttc tgttgcttat gaaagtttac gccctgacac |
| | 9121 | acgttatgtg ctcatggatg gctctattat tcaatttcct aacacctacc ttgaaggttc |
| | 9181 | tgttagagtg gtaacaactt ttgattctga gtactgtagg cacggcactt gtgaaagatc |
| | 9241 | agaagctggt gtttgtgtat ctactagtgg tagatgggta cttaacaatg attattacag |
| | 9301 | atctttacca ggagttttct gtggtgtaga tgctgtaaat ttacttacta atatgtttac |
| | 9361 | accactaatt caacctattg gtgctttgga catatcagca tctatagtag ctggtggtat |
| | 9421 | tgtagctatc gtagtaacat gccttgccta ctattttatg aggtttagaa gagcttttgg |
| | 9481 | tgaatacagt catgtagttg cctttaatac tttactattc cttatgtcat tcactgtact |
| | 9541 | ctgtttaaca ccagtttact cattcttacc tggtgtttat tctgttattt acttgtactt |
| | 9601 | gacattttat cttactaatg atgtttcttt tttagcacat attcagtgga tggttatgtt |
| | 9661 | cacaccttta gtacctttct ggataacaat tgcttatatc atttgtattt ccacaaagca |
| | 9721 | tttctattgg ttctttagta attacctaaa gagacgtgta gtctttaatg gtgtttcctt |
| | 9781 | tagtactttt gaagaagctg cgctgtgcac ctttttgtta aataaagaaa tgtatctaaa |
| | 9841 | gttgcgtagt gatgtgctat tacctcttac gcaatataat agatacttag ctctttataa |
| | 9901 | taagtacaag tattttagtg gagcaatgga tacaactagc tacagagaag ctgcttgttg |
| | 9961 | tcatctcgca aaggctctca atgacttcag taactcaggt tctgatgttc tttaccaacc |
| | 10021 | accacaaacc tctatcacct cagctgtttt gcagagtggt tttagaaaaa tggcattccc |
| | 10081 | atctggtaaa gttgagggtt gtatggtaca agtaacttgt ggtacaacta cacttaacgg |
| | 10141 | tctttggctt gatgacgtag tttactgtcc aagacatgtg atctgcacct ctgaagacat |
| | 10201 | gcttaaccct aattatgaag atttactcat tcgtaagtct aatcataatt tcttggtaca |
| | 10261 | ggctggtaat gttcaactca gggttattgg acattctatg caaaattgtg tacttaagct |
| | 10321 | taaggttgat acagccaatc ctaagacacc taagtataag tttgttcgca ttcaaccagg |
| | 10381 | acagactttt tcagtgttag cttgttacaa tggttcacca tctggtgttt accaatgtgc |
| | 10441 | tatgaggccc aatttcacta ttaagggttc attccttaat ggttcatgtg gtagtgttgg |
| | 10501 | ttttaacata gattatgact gtgtctcttt ttgttacatg caccatatgg aattaccaac |
| | 10561 | tggagttcat gctggcacag acttagaagg taacttttat ggaccttttg ttgacaggca |
| | 10621 | aacagcacaa gcagctggta cggacacaac tattacagtt aatgttttag cttggttgta |
| | 10681 | cgctgctgtt ataaatggag acaggtggtt tctcaatcga tttaccacaa ctcttaatga |
| | 10741 | ctttaacctt gtggctatga agtacaatta tgaacctcta acacaagacc atgttgacat |
| | 10801 | actaggacct ctttctgctc aaactggaat tgccgtttta gatatgtgtg cttcattaaa |
| | 10861 | agaattactg caaaatggta tgaatggacg taccatattg ggtagtgctt tattagaaga |
| | 10921 | tgaatttaca ccttttgatg ttgttagaca atgctcaggt gttactttcc aaagtgcagt |
| | 10981 | gaaaagaaca atcaagggta cacaccactg gttgttactc acaattttga cttcactttt |
| | 11041 | agttttagtc cagagtactc aatggtcttt gttctttttt ttgtatgaaa atgccttttt |
| | 11101 | accttttgct atgggtatta ttgctatgtc tgcttttgca atgatgtttg tcaaacataa |
| | 11161 | gcatgcattt ctctgtttgt ttttgttacc ttctcttgcc actgtagctt attttaatat |
| | 11221 | ggtctatatg cctgctagtt gggtgatgcg tattatgaca tggttggata tggttgatac |
| | 11281 | tagtttgtct ggttttaagc taaaagactg tgttatgtat gcatcagctg tagtgttact |
| | 11341 | aatccttatg acagcaagaa ctgtgtatga tgatggtgct aggagagtgt ggacacttat |
| | 11401 | gaatgtcttg acactcgttt ataaagttta ttatggtaat gctttagatc aagccatttc |
| | 11461 | catgtgggct cttataatct ctgttacttc taactactca ggtgtagtta caactgtcat |
| | 11521 | gtttttggcc agaggtattg tttttatgtg tgttgagtat tgccctattt tcttcataac |
| | 11581 | tggtaataca cttcagtgta taatgctagt ttattgtttc ttaggctatt tttgtacttg |
| | 11641 | ttactttggc ctcttttgtt tactcaaccg ctactttaga ctgactcttg gtgtttatga |
| | 11701 | ttacttagtt tctacacagg agtttagata tatgaattca cagggactac tcccacccaa |
| | 11761 | gaatagcata gatgccttca aactcaacat taaattgttg ggtgttggtg gcaaaccttg |
| | 11821 | tatcaaagta gccactgtac agtctaaaat gtcagatgta aagtgcacat cagtagtctt |
| | 11881 | actctcagtt ttgcaacaac tcagagtaga atcatcatct aaattgtggg ctcaatgtgt |
| | 11941 | ccagttacac aatgacattc tcttagctaa agatactact gaagcctttg aaaaaatggt |
| | 12001 | ttcactactt tctgttttgc tttccatgca gggtgctgta gacataaaca agctttgtga |
| | 12061 | agaaatgctg gacaacaggg caaccttaca agctatagcc tcagagttta gttcccttcc |
| | 12121 | atcatatgca gcttttgcta ctgctcaaga agcttatgag caggctgttg ctaatggtga |
| | 12181 | ttctgaagtt gttcttaaaa agttgaagaa gtctttgaat gtggctaaat ctgaatttga |
| | 12241 | ccgtgatgca gccatgcaac gtaagttgga aaagatggct gatcaagcta tgacccaaat |
| | 12301 | gtataaacag gctagatctg aggacaagag ggcaaaagtt actagtgcta tgcagacaat |
| | 12361 | gcttttcact atgcttagaa agttggataa tgatgcactc aacaacatta tcaacaatgc |
| | 12421 | aagagatggt tgtgttccct tgaacataat acctcttaca acagcagcca aactaatggt |
| | 12481 | tgtcatacca gactataaca catataaaaa tacgtgtgat ggtacaacat ttacttatgc |
| | 12541 | atcagcattg tgggaaatcc aacaggttgt agatgcagat agtaaaattg ttcaacttag |
| | 12601 | tgaaattagt atggacaatt cacctaattt agcatggcct cttattgtaa cagctttaag |
| | 12661 | ggccaattct gctgtcaaat tacagaataa tgagcttagt cctgttgcac tacgacagat |
| | 12721 | gtcttgtgct gccggtacta cacaaactgc ttgcactgat gacaatgcgt tagcttacta |
| | 12781 | caacacaaca aagggaggta ggtttgtact tgcactgtta tccgatttac aggatttgaa |
| | 12841 | atgggctaga ttccctaaga gtgatggaac tggtactatc tatacagaac tggaaccacc |
| | 12901 | ttgtaggttt gttacagaca cacctaaagg tcctaaagtg aagtatttat actttattaa |
| | 12961 | aggattaaac aacctaaata gaggtatggt acttggtagt ttagctgcca cagtacgtct |
| | 13021 | acaagctggt aatgcaacag aagtgcctgc caattcaact gtattatctt tctgtgcttt |
| | 13081 | tgctgtagat gctgctaaag cttacaaaga ttatctagct agtgggggac aaccaatcac |
| | 13141 | taattgtgtt aagatgttgt gtacacacac tggtactggt caggcaataa cagttacacc |
| | 13201 | ggaagccaat atggatcaag aatcctttgg tggtgcatcg tgttgtctgt actgccgttg |
| | 13261 | ccacatagat catccaaatc ctaaaggatt ttgtgactta aaaggtaagt atgtacaaat |
| | 13321 | acctacaact tgtgctaatg accctgtggg ttttacactt aaaaacacag tctgtaccgt |
| | 13381 | ctgcggtatg tggaaaggtt atggctgtag ttgtgatcaa ctccgcgaac ccatgcttca |
| | 13441 | gtcagctgat gcacaatcgt ttttaaacgg gtttgcggtg taagtgcagc ccgtcttaca |
| | 13501 | ccgtgcggca caggcactag tactgatgtc gtatacaggg cttttgacat ctacaatgat |
| | 13561 | aaagtagctg gttttgctaa attcctaaaa actaattgtt gtcgcttcca agaaaaggac |
| | 13621 | gaagatgaca atttaattga ttcttacttt gtagttaaga gacacacttt ctctaactac |
| | 13681 | caacatgaag aaacaattta taatttactt aaggattgtc cagctgttgc taaacatgac |
| | 13741 | ttctttaagt ttagaataga cggtgacatg gtaccacata tatcacgtca acgtcttact |
| | 13801 | aaatacacaa tggcagacct cgtctatgct ttaaggcatt ttgatgaagg taattgtgac |
| | 13861 | acattaaaag aaatacttgt cacatacaat tgttgtgatg atgattattt caataaaaag |
| | 13921 | gactggtatg attttgtaga aaacccagat atattacgcg tatacgccaa cttaggtgaa |
| | 13981 | cgtgtacgcc aagctttgtt aaaaacagta caattctgtg atgccatgcg aaatgctggt |
| | 14041 | attgttggtg tactgacatt agataatcaa gatctcaatg gtaactggta tgatttcggt |
| | 14101 | gatttcatac aaaccacgcc aggtagtgga gttcctgttg tagattctta ttattcattg |
| | 14161 | ttaatgccta tattaacctt gaccagggct ttaactgcag agtcacatgt tgacactgac |
| | 14221 | ttaacaaagc cttacattaa gtgggatttg ttaaaatatg acttcacgga agagaggtta |
| | 14281 | aaactctttg accgttattt taaatattgg gatcagacat accacccaaa ttgtgttaac |
| | 14341 | tgtttggatg acagatgcat tctgcattgt gcaaacttta atgttttatt ctctacagtg |
| | 14401 | ttcccaccta caagttttgg accactagtg agaaaaatat ttgttgatgg tgttccattt |
| | 14461 | gtagtttcaa ctggatacca cttcagagag ctaggtgttg tacataatca ggatgtaaac |
| | 14521 | ttacatagct ctagacttag ttttaaggaa ttacttgtgt atgctgctga ccctgctatg |
| | 14581 | cacgctgctt ctggtaatct attactagat aaacgcacta cgtgcttttc agtagctgca |
| | 14641 | cttactaaca atgttgcttt tcaaactgtc aaacccggta attttaacaa agacttctat |
| | 14701 | gactttgctg tgtctaaggg tttctttaag gaaggaagtt ctgttgaatt aaaacacttc |
| | 14761 | ttctttgctc aggatggtaa tgctgctatc agcgattatg actactatcg ttataatcta |
| | 14821 | ccaacaatgt gtgatatcag acaactacta tttgtagttg aagttgttga taagtacttt |
| | 14881 | gattgttacg atggtggctg tattaatgct aaccaagtca tcgtcaacaa cctagacaaa |
| | 14941 | tcagctggtt ttccatttaa taaatggggt aaggctagac tttattatga ttcaatgagt |
| | 15001 | tatgaggatc aagatgcact tttcgcatat acaaaacgta atgtcatccc tactataact |
| | 15061 | caaatgaatc ttaagtatgc cattagtgca aagaatagag ctcgcaccgt agctggtgtc |
| | 15121 | tctatctgta gtactatgac caatagacag tttcatcaaa aattattgaa atcaatagcc |
| | 15181 | gccactagag gagctactgt agtaattgga acaagcaaat tctatggtgg ttggcacaac |
| | 15241 | atgttaaaaa ctgtttatag tgatgtagaa aaccctcacc ttatgggttg ggattatcct |
| | 15301 | aaatgtgata gagccatgcc taacatgctt agaattatgg cctcacttgt tcttgctcgc |
| | 15361 | aaacatacaa cgtgttgtag cttgtcacac cgtttctata gattagctaa tgagtgtgct |
| | 15421 | caagtattga gtgaaatggt catgtgtggc ggttcactat atgttaaacc aggtggaacc |
| | 15481 | tcatcaggag atgccacaac tgcttatgct aatagtgttt ttaacatttg tcaagctgtc |
| | 15541 | acggccaatg ttaatgcact tttatctact gatggtaaca aaattgccga taagtatgtc |
| | 15601 | cgcaatttac aacacagact ttatgagtgt ctctatagaa atagagatgt tgacacagac |
| | 15661 | tttgtgaatg agttttacgc atatttgcgt aaacatttct caatgatgat actctctgac |
| | 15721 | gatgctgttg tgtgtttcaa tagcacttat gcatctcaag gtctagtggc tagcataaag |
| | 15781 | aactttaagt cagttcttta ttatcaaaac aatgttttta tgtctgaagc aaaatgttgg |
| | 15841 | actgagactg accttactaa aggacctcat gaattttgct ctcaacatac aatgctagtt |
| | 15901 | aaacagggtg atgattatgt gtaccttcct tacccagatc catcaagaat cctaggggcc |
| | 15961 | ggctgttttg tagatgatat cgtaaaaaca gatggtacac ttatgattga acggttcgtg |
| | 16021 | tctttagcta tagatgctta cccacttact aaacatccta atcaggagta tgctgatgtc |
| | 16081 | tttcatttgt acttacaata cataagaaag ctacatgatg agttaacagg acacatgtta |
| | 16141 | gacatgtatt ctgttatgct tactaatgat aacacttcaa ggtattggga acctgagttt |
| | 16201 | tatgaggcta tgtacacacc gcatacagtc ttacaggctg ttggggcttg tgttctttgc |
| | 16261 | aattcacaga cttcattaag atgtggtgct tgcatacgta gaccattctt atgttgtaaa |
| | 16321 | tgctgttacg accatgtcat atcaacatca cataaattag tcttgtctgt taatccgtat |
| | 16381 | gtttgcaatg ctccaggttg tgatgtcaca gatgtgactc aactttactt aggaggtatg |
| | 16441 | agctattatt gtaaatcaca taaaccaccc attagttttc cattgtgtgc taatggacaa |
| | 16501 | gtttttggtt tatataaaaa tacatgtgtt ggtagcgata atgttactga ctttaatgca |
| | 16561 | attgcaacat gtgactggac aaatgctggt gattacattt tagctaacac ctgtactgaa |
| | 16621 | agactcaagc tttttgcagc agaaacgctc aaagctactg aggagacatt taaactgtct |
| | 16681 | tatggtattg ctactgtacg tgaagtgctg tctgacagag aattacatct ttcatgggaa |
| | 16741 | gttggtaaac ctagaccacc acttaaccga aattatgtct ttactggtta tcgtgtaact |
| | 16801 | aaaaacagta aagtacaaat aggagagtac acctttgaaa aaggtgacta tggtgatgct |
| | 16861 | gttgtttacc gaggtacaac aacttacaaa ttaaatgttg gtgattattt tgtgctgaca |
| | 16921 | tcacatacag taatgccatt aagtgcacct acactagtgc cacaagagca ctatgttaga |
| | 16981 | attactggct tatacccaac actcaatatc tcagatgagt tttctagcaa tgttgcaaat |
| | 17041 | tatcaaaagg ttggtatgca aaagtattct acactccagg gaccacctgg tactggtaag |
| | 17101 | agtcattttg ctattggcct agctctctac tacccttctg ctcgcatagt gtatacagct |
| | 17161 | tgctctcatg ccgctgttga tgcactatgt gagaaggcat taaaatattt gcctatagat |
| | 17221 | aaatgtagta gaattatacc tgcacgtgct cgtgtagagt gttttgataa attcaaagtg |
| | 17281 | aattcaacat tagaacagta tgtcttttgt actgtaaatg cattgcctga gacgacagca |
| | 17341 | gatatagttg tctttgatga aatttcaatg gccacaaatt atgatttgag tgttgtcaat |
| | 17401 | gccagattac gtgctaagca ctatgtgtac attggcgacc ctgctcaatt acctgcacca |
| | 17461 | cgcacattgc taactaaggg cacactagaa ccagaatatt tcaattcagt gtgtagactt |
| | 17521 | atgaaaacta taggtccaga catgttcctc ggaacttgtc ggcgttgtcc tgctgaaatt |
| | 17581 | gttgacactg tgagtgcttt ggtttatgat aataagctta aagcacataa agacaaatca |
| | 17641 | gctcaatgct ttaaaatgtt ttataagggt gttatcacgc atgatgtttc atctgcaatt |
| | 17701 | aacaggccac aaataggcgt ggtaagagaa ttccttacac gtaaccctgc ttggagaaaa |
| | 17761 | gctgtcttta tttcacctta taattcacag aatgctgtag cctcaaagat tttgggacta |
| | 17821 | ccaactcaaa ctgttgattc atcacagggc tcagaatatg actatgtcat attcactcaa |
| | 17881 | accactgaaa cagctcactc ttgtaatgta aacagattta atgttgctat taccagagca |
| | 17941 | aaagtaggca tactttgcat aatgtctgat agagaccttt atgacaagtt gcaatttaca |
| | 18001 | agtcttgaaa ttccacgtag gaatgtggca actttacaag ctgaaaatgt aacaggactc |
| | 18061 | tttaaagatt gtagtaaggt aatcactggg ttacatccta cacaggcacc tacacacctc |
| | 18121 | agtgttgaca ctaaattcaa aactgaaggt ttatgtgttg acatacctgg catacctaag |
| | 18181 | gacatgacct atagaagact catctctatg atgggtttta aaatgaatta tcaagttaat |
| | 18241 | ggttacccta acatgtttat cacccgcgaa gaagctataa gacatgtacg tgcatggatt |
| | 18301 | ggcttcgatg tcgaggggtg tcatgctact agagaagctg ttggtaccaa tttaccttta |
| | 18361 | cagctaggtt tttctacagg tgttaaccta gttgctgtac ctacaggtta tgttgataca |
| | 18421 | cctaataata cagatttttc cagagttagt gctaaaccac cgcctggaga tcaatttaaa |
| | 18481 | cacctcatac cacttatgta caaaggactt ccttggaatg tagtgcgtat aaagattgta |
| | 18541 | caaatgttaa gtgacacact taaaaatctc tctgacagag tcgtatttgt cttatgggca |
| | 18601 | catggctttg agttgacatc tatgaagtat tttgtgaaaa taggacctga gcgcacctgt |
| | 18661 | tgtctatgtg atagacgtgc cacatgcttt tccactgctt cagacactta tgcctgttgg |
| | 18721 | catcattcta ttggatttga ttacgtctat aatccgttta tgattgatgt tcaacaatgg |
| | 18781 | ggttttacag gtaacctaca aagcaaccat gatctgtatt gtcaagtcca tggtaatgca |
| | 18841 | catgtagcta gttgtgatgc aatcatgact aggtgtctag ctgtccacga gtgctttgtt |
| | 18901 | aagcgtgttg actggactat tgaatatcct ataattggtg atgaactgaa gattaatgcg |
| | 18961 | gcttgtagaa aggttcaaca catggttgtt aaagctgcat tattagcaga caaattccca |
| | 19021 | gttcttcacg acattggtaa ccctaaagct attaagtgtg tacctcaagc tgatgtagaa |
| | 19081 | tggaagttct atgatgcaca gccttgtagt gacaaagctt ataaaataga agaattattc |
| | 19141 | tattcttatg ccacacattc tgacaaattc acagatggtg tatgcctatt ttggaattgc |
| | 19201 | aatgtcgata gatatcctgc taattccatt gtttgtagat ttgacactag agtgctatct |
| | 19261 | aaccttaact tgcctggttg tgatggtggc agtttgtatg taaataaaca tgcattccac |
| | 19321 | acaccagctt ttgataaaag tgcttttgtt aatttaaaac aattaccatt tttctattac |
| | 19381 | tctgacagtc catgtgagtc tcatggaaaa caagtagtgt cagatataga ttatgtacca |
| | 19441 | ctaaagtctg ctacgtgtat aacacgttgc aatttaggtg gtgctgtctg tagacatcat |
| | 19501 | gctaatgagt acagattgta tctcgatgct tataacatga tgatctcagc tggctttagc |
| | 19561 | ttgtgggttt acaaacaatt tgatacttat aacctctgga acacttttac aagacttcag |
| | 19621 | agtttagaaa atgtggcttt taatgttgta aataagggac actttgatgg acaacagggt |
| | 19681 | gaagtaccag tttctatcat taataacact gtttacacaa aagttgatgg tgttgatgta |
| | 19741 | gaattgtttg aaaataaaac aacattacct gttaatgtag catttgagct ttgggctaag |
| | 19801 | cgcaacatta aaccagtacc agaggtgaaa atactcaata atttgggtgt ggacattgct |
| | 19861 | gctaatactg tgatctggga ctacaaaaga gatgctccag cacatatatc tactattggt |
| | 19921 | gtttgttcta tgactgacat agccaagaaa ccaactgaaa cgatttgtgc accactcact |
| | 19981 | gtcttttttg atggtagagt tgatggtcaa gtagacttat ttagaaatgc ccgtaatggt |
| | 20041 | gttcttatta cagaaggtag tgttaaaggt ttacaaccat ctgtaggtcc caaacaagct |
| | 20101 | agtcttaatg gagtcacatt aattggagaa gccgtaaaaa cacagttcaa ttattataag |
| | 20161 | aaagttgatg gtgttgtcca acaattacct gaaacttact ttactcagag tagaaattta |
| | 20221 | caagaattta aacccaggag tcaaatggaa attgatttct tagaattagc tatggatgaa |
| | 20281 | ttcattgaac ggtataaatt agaaggctat gccttcgaac atatcgttta tggagatttt |
| | 20341 | agtcatagtc agttaggtgg tttacatcta ctgattggac tagctaaacg ttttaaggaa |
| | 20401 | tcaccttttg aattagaaga ttttattcct atggacagta cagttaaaaa ctatttcata |
| | 20461 | acagatgcgc aaacaggttc atctaagtgt gtgtgttctg ttattgattt attacttgat |
| | 20521 | gattttgttg aaataataaa atcccaagat ttatctgtag tttctaaggt tgtcaaagtg |
| | 20581 | actattgact atacagaaat ttcatttatg ctttggtgta aagatggcca tgtagaaaca |
| | 20641 | ttttacccaa aattacaatc tagtcaagcg tggcaaccgg gtgttgctat gcctaatctt |
| | 20701 | tacaaaatgc aaagaatgct attagaaaag tgtgaccttc aaaattatgg tgatagtgca |
| | 20761 | acattaccta aaggcataat gatgaatgtc gcaaaatata ctcaactgtg tcaatattta |
| | 20821 | aacacattaa cattagctgt accctataat atgagagtta tacattttgg tgctggttct |
| | 20881 | gataaaggag ttgcaccagg tacagctgtt ttaagacagt ggttgcctac gggtacgctg |
| | 20941 | cttgtcgatt cagatcttaa tgactttgtc tctgatgcag attcaacttt gattggtgat |
| | 21001 | tgtgcaactg tacatacagc taataaatgg gatctcatta ttagtgatat gtacgaccct |
| | 21061 | aagactaaaa atgttacaaa agaaaatgac tctaaagagg gttttttcac ttacatttgt |
| | 21121 | gggtttatac aacaaaagct agctcttgga ggttccgtgg ctataaagat aacagaacat |
| | 21181 | tcttggaatg ctgatcttta taagctcatg ggacacttcg catggtggac agcctttgtt |
| | 21241 | actaatgtga atgcgtcatc atctgaagca tttttaattg gatgtaatta tcttggcaaa |
| | 21301 | ccacgcgaac aaatagatgg ttatgtcatg catgcaaatt acatattttg gaggaataca |
| | 21361 | aatccaattc agttgtcttc ctattcttta tttgacatga gtaaatttcc ccttaaatta |
| | 21421 | aggggtactg ctgttatgtc tttaaaagaa ggtcaaatca atgatatgat tttatctctt |
| | 21481 | cttagtaaag gtagacttat aattagagaa aacaacagag ttgttatttc tagtgatgtt |
| | 21541 | cttgttaaca actaaacgaa caatgtttgt ttttcttgtt ttattgccac tagtctctag |
| | 21601 | tcagtgtgtt aatcttacaa ccagaactca attaccccct gcatacacta attctttcac |
| | 21661 | acgtggtgtt tattaccctg acaaagtttt cagatcctca gttttacatt caactcagga |
| | 21721 | cttgttctta cctttctttt ccaatgttac ttggttccat gctatacatg tctctgggac |
| | 21781 | caatggtact aagaggtttg ataaccctgt cctaccattt aatgatggtg tttattttgc |
| | 21841 | ttccactgag aagtctaaca taataagagg ctggattttt ggtactactt tagattcgaa |
| | 21901 | gacccagtcc ctacttattg ttaataacgc tactaatgtt gttattaaag tctgtgaatt |
| | 21961 | tcaattttgt aatgatccat ttttgggtgt ttattaccac aaaaacaaca aaagttggat |
| | 22021 | ggaaagtgag ttcagagttt attctagtgc gaataattgc acttttgaat atgtctctca |
| | 22081 | gccttttctt atggaccttg aaggaaaaca gggtaatttc aaaaatctta gggaatttgt |
| | 22141 | gtttaagaat attgatggtt attttaaaat atattctaag cacacgccta ttaatttagt |
| | 22201 | gcgtgatctc cctcagggtt tttcggcttt agaaccattg gtagatttgc caataggtat |
| | 22261 | taacatcact aggtttcaaa ctttacttgc tttacataga agttatttga ctcctggtga |
| | 22321 | ttcttcttca ggttggacag ctggtgctgc agcttattat gtgggttatc ttcaacctag |
| | 22381 | gacttttcta ttaaaatata atgaaaatgg aaccattaca gatgctgtag actgtgcact |
| | 22441 | tgaccctctc tcagaaacaa agtgtacgtt gaaatccttc actgtagaaa aaggaatcta |
| | 22501 | tcaaacttct aactttagag tccaaccaac agaatctatt gttagatttc ctaatattac |
| | 22561 | aaacttgtgc ccttttggtg aagtttttaa cgccaccaga tttgcatctg tttatgcttg |
| | 22621 | gaacaggaag agaatcagca actgtgttgc tgattattct gtcctatata attccgcatc |
| | 22681 | attttccact tttaagtgtt atggagtgtc tcctactaaa ttaaatgatc tctgctttac |
| | 22741 | taatgtctat gcagattcat ttgtaattag aggtgatgaa gtcagacaaa tcgctccagg |
| | 22801 | gcaaactgga aagattgctg attataatta taaattacca gatgatttta caggctgcgt |
| | 22861 | tatagcttgg aattctaaca atcttgattc taaggttggt ggtaattata attacctgta |
| | 22921 | tagattgttt aggaagtcta atctcaaacc ttttgagaga gatatttcaa ctgaaatcta |
| | 22981 | tcaggccggt agcacacctt gtaatggtgt tgaaggtttt aattgttact ttcctttaca |
| | 23041 | atcatatggt ttccaaccca ctaatggtgt tggttaccaa ccatacagag tagtagtact |
| | 23101 | ttcttttgaa cttctacatg caccagcaac tgtttgtgga cctaaaaagt ctactaattt |
| | 23161 | ggttaaaaac aaatgtgtca atttcaactt caatggttta acaggcacag gtgttcttac |
| | 23221 | tgagtctaac aaaaagtttc tgcctttcca acaatttggc agagacattg ctgacactac |
| | 23281 | tgatgctgtc cgtgatccac agacacttga gattcttgac attacaccat gttcttttgg |
| | 23341 | tggtgtcagt gttataacac caggaacaaa tacttctaac caggttgctg ttctttatca |
| | 23401 | ggatgttaac tgcacagaag tccctgttgc tattcatgca gatcaactta ctcctacttg |
| | 23461 | gcgtgtttat tctacaggtt ctaatgtttt tcaaacacgt gcaggctgtt taataggggc |
| | 23521 | tgaacatgtc aacaactcat atgagtgtga catacccatt ggtgcaggta tatgcgctag |
| | 23581 | ttatcagact cagactaatt ctcctcggcg ggcacgtagt gtagctagtc aatccatcat |
| | 23641 | tgcctacact atgtcacttg gtgcagaaaa ttcagttgct tactctaata actctattgc |
| | 23701 | catacccaca aattttacta ttagtgttac cacagaaatt ctaccagtgt ctatgaccaa |
| | 23761 | gacatcagta gattgtacaa tgtacatttg tggtgattca actgaatgca gcaatctttt |
| | 23821 | gttgcaatat ggcagttttt gtacacaatt aaaccgtgct ttaactggaa tagctgttga |
| | 23881 | acaagacaaa aacacccaag aagtttttgc acaagtcaaa caaatttaca aaacaccacc |
| | 23941 | aattaaagat tttggtggtt ttaatttttc acaaatatta ccagatccat caaaaccaag |
| | 24001 | caagaggtca tttattgaag atctactttt caacaaagtg acacttgcag atgctggctt |
| | 24061 | catcaaacaa tatggtgatt gccttggtga tattgctgct agagacctca tttgtgcaca |
| | 24121 | aaagtttaac ggccttactg ttttgccacc tttgctcaca gatgaaatga ttgctcaata |
| | 24181 | cacttctgca ctgttagcgg gtacaatcac ttctggttgg acctttggtg caggtgctgc |
| | 24241 | attacaaata ccatttgcta tgcaaatggc ttataggttt aatggtattg gagttacaca |
| | 24301 | gaatgttctc tatgagaacc aaaaattgat tgccaaccaa tttaatagtg ctattggcaa |
| | 24361 | aattcaagac tcactttctt ccacagcaag tgcacttgga aaacttcaag atgtggtcaa |
| | 24421 | ccaaaatgca caagctttaa acacgcttgt taaacaactt agctccaatt ttggtgcaat |
| | 24481 | ttcaagtgtt ttaaatgata tcctttcacg tcttgacaaa gttgaggctg aagtgcaaat |
| | 24541 | tgataggttg atcacaggca gacttcaaag tttgcagaca tatgtgactc aacaattaat |
| | 24601 | tagagctgca gaaatcagag cttctgctaa tcttgctgct actaaaatgt cagagtgtgt |
| | 24661 | acttggacaa tcaaaaagag ttgatttttg tggaaagggc tatcatctta tgtccttccc |
| | 24721 | tcagtcagca cctcatggtg tagtcttctt gcatgtgact tatgtccctg cacaagaaaa |
| | 24781 | gaacttcaca actgctcctg ccatttgtca tgatggaaaa gcacactttc ctcgtgaagg |
| | 24841 | tgtctttgtt tcaaatggca cacactggtt tgtaacacaa aggaattttt atgaaccaca |
| | 24901 | aatcattact acagacaaca catttgtgtc tggtaactgt gatgttgtaa taggaattgt |
| | 24961 | caacaacaca gtttatgatc ctttgcaacc tgaattagac tcattcaagg aggagttaga |
| | 25021 | taaatatttt aagaatcata catcaccaga tgttgattta ggtgacatct ctggcattaa |
| | 25081 | tgcttcagtt gtaaacattc aaaaagaaat tgaccgcctc aatgaggttg ccaagaattt |
| | 25141 | aaatgaatct ctcatcgatc tccaagaact tggaaagtat gagcagtata taaaatggcc |
| | 25201 | atggtacatt tggctaggtt ttatagctgg cttgattgcc atagtaatgg tgacaattat |
| | 25261 | gctttgctgt atgaccagtt gctgtagttg tctcaagggc tgttgttctt gtggatcctg |
| | 25321 | ctgcaaattt gatgaagacg actctgagcc agtgctcaaa ggagtcaaat tacattacac |
| | 25381 | ataaacgaac ttatggattt gtttatgaga atcttcacaa ttggaactgt aactttgaag |
| | 25441 | caaggtgaaa tcaaggatgc tactccttca gattttgttc gcgctactgc aacgataccg |
| | 25501 | atacaagcct cactcccttt cggatggctt attgttggcg ttgcacttct tgctgttttt |
| | 25561 | cagagcgctt ccaaaatcat aaccctcaaa aagagatggc aactagcact ctccaagggt |
| | 25621 | gttcactttg tttgcaactt gctgttgttg tttgtaacag tttactcaca ccttttgctc |
| | 25681 | gttgctgctg gccttgaagc cccttttctc tatctttatg ctttagtcta cttcttgcag |
| | 25741 | agtataaact ttgtaagaat aataatgagg ctttggcttt gctggaaatg ccgttccaaa |
| | 25801 | aacccattac tttatgatgc caactatttt ctttgctggc atactaattg ttacgactat |
| | 25861 | tgtatacctt acaatagtgt aacttcttca attgtcatta cttcaggtga tggcacaaca |
| | 25921 | agtcctattt ctgaacatga ctaccagatt ggtggttata ctgaaaaatg ggaatctgga |
| | 25981 | gtaaaagact gtgttgtatt acacagttac ttcacttcag actattacca gctgtactca |
| | 26041 | actcaattga gtacagacac tggtgttgaa catgttacct tcttcatcta caataaaatt |
| | 26101 | gttgatgagc ctgaagaaca tgtccaaatt cacacaatcg acggttcatc cggagttgtt |
| | 26161 | aatccagtaa tggaaccaat ttatgatgaa ccgacgacga ctactagcgt gcctttgtaa |
| | 26221 | gcacaagctg atgagtacga acttatgtac tcattcgttt cggaagagac aggtacgtta |
| | 26281 | atagttaata gcgtacttct ttttcttgct ttcgtggtat tcttgctagt tacactagcc |
| | 26341 | atccttactg cgcttcgatt gtgtgcgtac tgctgcaata ttgttaacgt gagtcttgta |
| | 26401 | aaaccttctt tttacgttta ctctcgtgtt aaaaatctga attcttctag agttcctgat |
| | 26461 | cttctggtct aaacgaacta aatattatat tagtttttct gtttggaact ttaattttag |
| | 26521 | ccatggcaga ttccaacggt actattaccg ttgaagagct taaaaagctc cttgaacaat |
| | 26581 | ggaacctagt aataggtttc ctattcctta catggatttg tcttctacaa tttgcctatg |
| | 26641 | ccaacaggaa taggtttttg tatataatta agttaatttt cctctggctg ttatggccag |
| | 26701 | taactttagc ttgttttgtg cttgctgctg tttacagaat aaattggatc accggtggaa |
| | 26761 | ttgctatcgc aatggcttgt cttgtaggct tgatgtggct cagctacttc attgcttctt |
| | 26821 | tcagactgtt tgcgcgtacg cgttccatgt ggtcattcaa tccagaaact aacattcttc |
| | 26881 | tcaacgtgcc actccatggc actattctga ccagaccgct tctagaaagt gaactcgtaa |
| | 26941 | tcggagctgt gatccttcgt ggacatcttc gtattgctgg acaccatcta ggacgctgtg |
| | 27001 | acatcaagga cctgcctaaa gaaatcactg ttgctacatc acgaacgctt tcttattaca |
| | 27061 | aattgggagc ttcgcagcgt gtagcaggtg actcaggttt tgctgcatac agtcgctaca |
| | 27121 | ggattggcaa ctataaatta aacacagacc attccagtag cagtgacaat attgctttgc |
| | 27181 | ttgtacagta agtgacaaca gatgtttcat ctcgttgact ttcaggttac tatagcagag |
| | 27241 | atattactaa ttattatgag gacttttaaa gtttccattt ggaatcttga ttacatcata |
| | 27301 | aacctcataa ttaaaaattt atctaagtca ctaactgaga ataaatattc tcaattagat |
| | 27361 | gaagagcaac caatggagat tgattaaacg aacatgaaaa ttattctttt cttggcactg |
| | 27421 | ataacactcg ctacttgtga gctttatcac taccaagagt gtgttagagg tacaacagta |
| | 27481 | cttttaaaag aaccttgctc ttctggaaca tacgagggca attcaccatt tcatcctcta |
| | 27541 | gctgataaca aatttgcact gacttgcttt agcactcaat ttgcttttgc ttgtcctgac |
| | 27601 | ggcgtaaaac acgtctatca gttacgtgcc agatcagttt cacctaaact gttcatcaga |
| | 27661 | caagaggaag ttcaagaact ttactctcca atttttctta ttgttgcggc aatagtgttt |
| | 27721 | ataacacttt gcttcacact caaaagaaag acagaatgat tgaactttca ttaattgact |
| | 27781 | tctatttgtg ctttttagcc tttctgctat tccttgtttt aattatgctt attatctttt |
| | 27841 | ggttctcact tgaactgcaa gatcataatg aaacttgtca cgcctaaacg aacatgaaat |
| | 27901 | ttcttgtttt cttaggaatc atcacaactg tagctgcatt tcaccaagaa tgtagtttac |
| | 27961 | agtcatgtac tcaacatcaa ccatatgtag ttgatgaccc gtgtcctatt cacttctatt |
| | 28021 | ctaaatggta tattagagta ggagctagaa aatcagcacc tttaattgaa ttgtgcgtgg |
| | 28081 | atgaggctgg ttctaaatca cccattcagt acatcgatat cggtaattat acagtttcct |
| | 28141 | gtttaccttt tacaattaat tgccaggaac ctaaattggg tagtcttgta gtgcgttgtt |
| | 28201 | cgttctatga agacttttta gagtatcatg acgttcgtgt tgttttagat ttcatctaaa |
| | 28261 | cgaacaaact aaaatgtctg ataatggacc ccaaaatcag cgaaatgcac cccgcattac |
| | 28321 | gtttggtgga ccctcagatt caactggcag taaccagaat ggagaacgca gtggggcgcg |
| | 28381 | atcaaaacaa cgtcggcccc aaggtttacc caataatact gcgtcttggt tcaccgctct |
| | 28441 | cactcaacat ggcaaggaag accttaaatt ccctcgagga caaggcgttc caattaacac |
| | 28501 | caatagcagt ccagatgacc aaattggcta ctaccgaaga gctaccagac gaattcgtgg |
| | 28561 | tggtgacggt aaaatgaaag atctcagtcc aagatggtat ttctactacc taggaactgg |
| | 28621 | gccagaagct ggacttccct atggtgctaa caaagacggc atcatatggg ttgcaactga |
| | 28681 | gggagccttg aatacaccaa aagatcacat tggcacccgc aatcctgcta acaatgctgc |
| | 28741 | aatcgtgcta caacttcctc aaggaacaac attgccaaaa ggcttctacg cagaagggag |
| | 28801 | cagaggcggc agtcaagcct cttctcgttc ctcatcacgt agtcgcaaca gttcaagaaa |
| | 28861 | ttcaactcca ggcagcagta ggggaacttc tcctgctaga atggctggca atggcggtga |
| | 28921 | tgctgctctt gctttgctgc tgcttgacag attgaaccag cttgagagca aaatgtctgg |
| | 28981 | taaaggccaa caacaacaag gccaaactgt cactaagaaa tctgctgctg aggcttctaa |
| | 29041 | gaagcctcgg caaaaacgta ctgccactaa agcatacaat gtaacacaag ctttcggcag |
| | 29101 | acgtggtcca gaacaaaccc aaggaaattt tggggaccag gaactaatca gacaaggaac |
| | 29161 | tgattacaaa cattggccgc aaattgcaca atttgccccc agcgcttcag cgttcttcgg |
| | 29221 | aatgtcgcgc attggcatgg aagtcacacc ttcgggaacg tggttgacct acacaggtgc |
| | 29281 | catcaaattg gatgacaaag atccaaattt caaagatcaa gtcattttgc tgaataagca |
| | 29341 | tattgacgca tacaaaacat tcccaccaac agagcctaaa aaggacaaaa agaagaaggc |
| | 29401 | tgatgaaact caagccttac cgcagagaca gaagaaacag caaactgtga ctcttcttcc |
| | 29461 | tgctgcagat ttggatgatt tctccaaaca attgcaacaa tccatgagca gtgctgactc |
| | 29521 | aactcaggcc taaactcatg cagaccacac aaggcagatg ggctatataa acgttttcgc |
| | 29581 | ttttccgttt acgatatata gtctactctt gtgcagaatg aattctcgta actacatagc |
| | 29641 | acaagtagat gtagttaact ttaatctcac atagcaatct ttaatcagtg tgtaacatta |
| | 29701 | gggaggactt gaaagagcca ccacattttc accgaggcca cgcggagtac gatcgagtgt |
| | 29761 | acagtgaaca atgctaggga gagctgccta tatggaagag ccctaatgtg taaaattaat |
| | 29821 | tttagtagtg ctatccccat gtgattttaa tagcttctta ggagaatgac aaaaaaaaaa |
| | 29881 | aaaaaaaaaa aaaaaaaaaa aaa |
| Nucleotide sequence | 1 | ttggctagtc aagatgatga atcttcatta tctgatatat tgcaaatcac tcaatatcta |
| of SARS-CoV-2 Spike | 61 | gactttctgt tattattatt gatccaatca aaaaataaat tagaagccgt gggtcattgt |
| protein in the TK locus. | 121 | tatgaatctc tttcagagga atacagacaa ttgacaaaat tcacagactt tcaagatttt |
| SEQ ID NO: 54 | 181 | aaaaaactgt ttaacaaggt ccctattgtt acagatggaa gggtcaaact taataaagga |
| | 241 | tatttgttcg actttgtgat tagtttgatg cgattcaaaa aagaatcctc tctagctacc |
| | 301 | accgcaatag atcctattag atacatagat cctcgtcgtg atatcgcatt ttctaacgtg |
| | 361 | atggatatat taaagttgaa taaagtgaac aataattaat tctttattgt catcggatcc |
| | 421 | cacgatgtgc tagactctct cgtctacgcg gccgcaaaaa ttgaaatttt attttttttt |
| | 481 | tttggaatat aaataatgtt cgtgttccta gtcctactac cgctagtctc ttcccagtgt |
| | 541 | gtaaacctaa caacgagaac acaactacca ccggcgtaca ccaattcttt cacaagagga |
| | 601 | gtatattacc cggacaaggt gttcagatcc tccgtactac attctaccca ggacctattc |
| | 661 | ctaccgttct tctctaacgt aacatggttc cacgcgatcc atgtctctgg aacaaacgga |
| | 721 | acgaagagat tcgataaccc ggtcttgccg ttcaacgatg gtgtatactt tgcgtccacc |
| | 781 | gagaagtcca acatcatcag aggatggatc ttcggaacca ccttggattc taagacccag |
| | 841 | tccttgctaa tcgtcaacaa cgcgaccaac gtcgtcatca aagtctgcga attccagttc |
| | 901 | tgtaacgacc cgtttttggg agtctactac cacaagaaca acaagtcctg gatggaatcc |
| | 961 | gagttcagag tctactcttc cgcgaacaac tgcaccttcg aatatgtatc tcagccgttc |
| | 1021 | ctaatggacc tagagggaaa gcagggaaac ttcaagaacc taagagagtt cgtattcaag |
| | 1081 | aacatcgacg gatacttcaa gatctactcc aagcacaccc cgatcaacct agttagagat |
| | 1141 | ctaccgcaag gattctctgc gctagaaccg ttagtagatt tgccgatcgg aatcaacatc |
| | 1201 | accagattcc agacactact agcgctacac agatcttacc taacgccggg agattcttct |
| | 1261 | tctggatgga ctgctggtgc tgcggcttat tatgtaggat acctacagcc gagaaccttc |
| | 1321 | ctattgaagt acaacgaaaa cggaaccatc accgatgccg tagattgtgc tctagatccg |
| | 1381 | ctatccgaaa cgaagtgcac cctaaagtct ttcaccgtcg agaagggaat ctaccagacc |
| | 1441 | tccaacttta gagtacagcc gaccgaatcc atcgtcagat ttccgaacat cacgaaccta |
| | 1501 | tgtccgttcg gagaagtgtt caacgcgaca agatttgcgt ctgtctatgc gtggaacaga |
| | 1561 | aaaagaatca gtaactgcgt cgcggactac tccgtcctat acaactctgc ctctttctcc |
| | 1621 | acgttcaaat gctacggtgt atccccgaca aagctaaacg atctatgctt caccaacgtc |
| | 1681 | tacgcggact ccttcgtaat cagaggagat gaagttagac agattgcgcc gggacaaact |
| | 1741 | ggaaagatcg cggattataa ctacaagcta ccggacgact tcaccggatg tgtaattgcg |
| | 1801 | tggaattcga acaacctaga ctccaaagtc ggaggaaact acaactactt gtacagacta |
| | 1861 | ttcagaaagt ccaacctaaa gccgttcgag agagacatct ccaccgaaat ctatcaggct |
| | 1921 | ggatctacac cgtgtaatgg tgtcgaagga ttcaactgct acttcccgct acagtcttac |
| | 1981 | ggatttcaac cgacaaacgg tgtaggatat cagccgtaca gagtcgtcgt actatccttc |
| | 2041 | gaactactac atgctccggc gacagtatgt ggaccgaaaa agtctaccaa cctagtcaag |
| | 2101 | aacaaatgcg tcaactttaa cttcaacgga ctaaccggaa ccggtgtcct aaccgaatct |
| | 2161 | aacaagaagt ttctaccgtt ccagcagttc ggaagagata tcgcggatac aacagacgct |
| | 2221 | gtcagagatc cgcaaacctt ggagatccta gatatcaccc cgtgttcttt cggtggtgtc |
| | 2281 | tctgtaatta ctccgggaac gaacacctcc aatcaagtag cggtactata ccaggacgtg |
| | 2341 | aactgtacag aagtaccggt agctattcac gcggatcaac taacaccaac ttggagagtg |
| | 2401 | tactccaccg gatctaacgt attccaaaca agagcgggat gtctaatcgg agcggaacac |
| | 2461 | gtaaacaact cctacgaatg tgatatcccg attggagcgg gaatctgtgc gtcttaccaa |
| | 2521 | acacaaacaa actccccgag aagagcgaga tctgtagcct ctcaatctat tatcgcctac |
| | 2581 | accatgtcct tgggagccga aaattctgtc gcgtactcca acaattctat cgcgatcccg |
| | 2641 | acaaacttca ccatctctgt aacaaccgag atcctaccgg tgtctatgac caagacatct |
| | 2701 | gtcgattgca ccatgtacat ctgcggagat tccaccgagt gctccaacct actactacag |
| | 2761 | tacggatctt tctgtaccca gctaaacaga gcgttgactg gaatcgctgt agagcaggat |
| | 2821 | aagaacaccc aagaggtatt cgcgcaagtc aagcagatct ataagactcc gccgatcaag |
| | 2881 | gacttcggag gttttaactt ctctcagatc ttgccggatc cgtccaaacc gtctaagaga |
| | 2941 | tctttcatcg aggacctact attcaacaaa gtcaccctag ctgacgcggg attcatcaaa |
| | 3001 | caatacggag attgcttggg agacattgcg gcgagagatc taatttgcgc gcagaagttt |
| | 3061 | aacggattga cagtactacc gccgctacta accgatgaga tgattgcgca gtacacgtct |
| | 3121 | gctctattgg cgggaacaat tacaagtgga tggacatttg gagccggtgc cgctctacaa |
| | 3181 | attccgtttg ctatgcaaat ggcgtacaga ttcaacggaa tcggagtaac ccagaacgtc |
| | 3241 | ttgtacgaga accagaagct aatcgcgaac cagttcaatt ccgcgatcgg aaagatccag |
| | 3301 | gacagtctat cttctactgc ttcggcgttg ggaaagctac aggatgtagt aaatcaaaac |
| | 3361 | gcgcaggcgc taaacacctt ggtcaagcaa ctatcctcta acttcggagc gatctcgtcc |
| | 3421 | gtcctaaacg acatcttatc cagactagat aaggtcgaag cggaggtcca gatcgataga |
| | 3481 | ctaatcactg gaagattgca gtccctacag acctacgtaa cacagcaact aattagagcg |
| | 3541 | gcggagatta gagcctctgc taatctagct gcgaccaaga tgtccgaatg tgtcttggga |
| | 3601 | caatccaaga gagtcgactt ttgcggaaag ggataccacc taatgtcttt tccacaatct |
| | 3661 | gcgccgcatg gtgtcgtatt cctacatgta acatatgtgc cggcgcaaga aaagaacttt |
| | 3721 | acaacagctc cagcgatctg ccatgatgga aaagctcatt ttccgagaga gggagtcttt |
| | 3781 | gtctctaacg gaactcattg gttcgtcacc cagagaaact tttacgagcc gcagatcatc |
| | 3841 | accaccgaca acacatttgt ttcgggaaac tgcgacgtgg tcatcggaat cgtaaacaat |
| | 3901 | accgtctacg atccgttgca gccggaacta gactccttca aagaagagtt ggacaagtac |
| | 3961 | tttaagaacc acacctctcc ggatgtcgac ttgggagata tttctggaat caacgcgtcc |
| | 4021 | gtcgtcaaca tccagaaaga aatcgataga ttgaacgagg tcgcgaagaa cttgaacgag |
| | 4081 | tccctaatcg acctacaaga gctaggaaaa tacgagcagt acatcaagtg gccgtggtac |
| | 4141 | atttggctag gattcattgc tggactaatt gcgatcgtca tggtcaccat catgctatgc |
| | 4201 | tgtatgacct cctgttgctc ctgtctaaag ggatgttgtt cctgcggatc ctgttgcaag |
| | 4261 | ttcgatgaag atgatagtga accggtccta aagggtgtca agctacacta cacataaaag |
| | 4321 | cttgtcgact attatatttt ttatctaaaa aactaaaaat aaacattgat taaattttaa |
| | 4381 | tataatactt aaaaatggat gttgtgtcgt tagataaacc gtttatgtat tttgaggaaa |
| | 4441 | ttgataatga gttagattac gaaccagaaa gtgcaaatga ggtcgcaaaa aaactaccgt |
| | 4501 | atcaaggaca gttaaaacta ttactaggag aattattttt tcttagtaag ttacagcgac |
| | 4561 | acggtatatt agatggtgcc accgtagtgt atataggatc ggctcctggt acacatatac |
| | 4621 | gttatttgag agatcatttc tataatttag gaatgattat caaatggatg ctaattgacg |
| | 4681 | gacgccatca tgatcctatt ctaaatggat tgcgtgatgt gactctagta tggtcatag |
| Nucleotide sequence | 1 | gagtattcta ggtgtttcta tagaatgtaa gaagtcatcg acattactta cttttttgac |
| of SARS-CoV-2 Spike | 61 | cgtgcgtaaa atgacccgag tatttaatag atttccagat atggcttatt atcgaggaga |
| protein in the HPXV200 | 121 | ctgtttaaaa gccgtttatg taacaatgac ttataaaaat actaaaactg gagagactga |
| (B22R) locus. | 181 | ttacacgtac ctctctaatg ggggttgcct gcatactatc gtaatggggt cgatggttga |
| SEQ ID NO: 55 | 241 | ttattgatta gtatattcct tattcttttt attcacacaa aaagaacatt tttataaaca |
| | 301 | tgaaaccact gtctaaatgt aattatgatc ttgatttata gatgaagatc agcctttaga |
| | 361 | ggattttaac cagtatgttt aatatgaaaa aaataaacat aacatatttt gagattaagc |
| | 421 | gctattgtgc ttaattattt tgctctataa actgaatata tagccacaat tattgacggg |
| | 481 | cttgtttatg accggcaatc ggatcccacg atgtgctaga ctctctcgtc tacgcggccg |
| | 541 | caaaaattga aattttattt tttttttttg gaatataaat aatgttcgtg ttcctagtcc |
| | 601 | tactaccgct agtctcttcc cagtgtgtaa acctaacaac gagaacacaa ctaccaccgg |
| | 661 | cgtacaccaa ttctttcaca agaggagtat attacccgga caaggtgttc agatcctccg |
| | 721 | tactacattc tacccaggac ctattcctac cgttcttctc taacgtaaca tggttccacg |
| | 781 | cgatccatgt ctctggaaca aacggaacga agagattcga taacccggtc ttgccgttca |
| | 841 | acgatggtgt atactttgcg tccaccgaga agtccaacat catcagagga tggatcttcg |
| | 901 | gaaccacctt ggattctaag acccagtcct tgctaatcgt caacaacgcg accaacgtcg |
| | 961 | tcatcaaagt ctgcgaattc cagttctgta acgacccgtt tttgggagtc tactaccaca |
| | 1021 | agaacaacaa gtcctggatg gaatccgagt tcagagtcta ctcttccgcg aacaactgca |
| | 1081 | ccttcgaata tgtatctcag ccgttcctaa tggacctaga gggaaagcag ggaaacttca |
| | 1141 | agaacctaag agagttcgta ttcaagaaca tcgacggata cttcaagatc tactccaagc |
| | 1201 | acaccccgat caacctagtt agagatctac cgcaaggatt ctctgcgcta gaaccgttag |
| | 1261 | tagatttgcc gatcggaatc aacatcacca gattccagac actactagcg ctacacagat |
| | 1321 | cttacctaac gccgggagat tcttcttctg gatggactgc tggtgctgcg gcttattatg |
| | 1381 | taggatacct acagccgaga accttcctat tgaagtacaa cgaaaacgga accatcaccg |
| | 1441 | atgccgtaga ttgtgctcta gatccgctat ccgaaacgaa gtgcacccta aagtctttca |
| | 1501 | ccgtcgagaa gggaatctac cagacctcca actttagagt acagccgacc gaatccatcg |
| | 1561 | tcagatttcc gaacatcacg aacctatgtc cgttcggaga agtgttcaac gcgacaagat |
| | 1621 | ttgcgtctgt ctatgcgtgg aacagaaaaa gaatcagtaa ctgcgtcgcg gactactccg |
| | 1681 | tcctatacaa ctctgcctct ttctccacgt tcaaatgcta cggtgtatcc ccgacaaagc |
| | 1741 | taaacgatct atgcttcacc aacgtctacg cggactcctt cgtaatcaga ggagatgaag |
| | 1801 | ttagacagat tgcgccggga caaactggaa agatcgcgga ttataactac aagctaccgg |
| | 1861 | acgacttcac cggatgtgta attgcgtgga attcgaacaa cctagactcc aaagtcggag |
| | 1921 | gaaactacaa ctacttgtac agactattca gaaagtccaa cctaaagccg ttcgagagag |
| | 1981 | acatctccac cgaaatctat caggctggat ctacaccgtg taatggtgtc gaaggattca |
| | 2041 | actgctactt cccgctacag tcttacggat ttcaaccgac aaacggtgta ggatatcagc |
| | 2101 | cgtacagagt cgtcgtacta tccttcgaac tactacatgc tccggcgaca gtatgtggac |
| | 2161 | cgaaaaagtc taccaaccta gtcaagaaca aatgcgtcaa ctttaacttc aacggactaa |
| | 2221 | ccggaaccgg tgtcctaacc gaatctaaca agaagtttct accgttccag cagttcggaa |
| | 2281 | gagatatcgc ggatacaaca gacgctgtca gagatccgca aaccttggag atcctagata |
| | 2341 | tcaccccgtg ttctttcggt ggtgtctctg taattactcc gggaacgaac acctccaatc |
| | 2401 | aagtagcggt actataccag gacgtgaact gtacagaagt accggtagct attcacgcgg |
| | 2461 | atcaactaac accaacttgg agagtgtact ccaccggatc taacgtattc caaacaagag |
| | 2521 | cgggatgtct aatcggagcg gaacacgtaa acaactccta cgaatgtgat atcccgattg |
| | 2581 | gagcgggaat ctgtgcgtct taccaaacac aaacaaactc cccgagaaga gcgagatctg |
| | 2641 | tagcctctca atctattatc gcctacacca tgtccttggg agccgaaaat tctgtcgcgt |
| | 2701 | actccaacaa ttctatcgcg atcccgacaa acttcaccat ctctgtaaca accgagatcc |
| | 2761 | taccggtgtc tatgaccaag acatctgtcg attgcaccat gtacatctgc ggagattcca |
| | 2821 | ccgagtgctc caacctacta ctacagtacg gatctttctg tacccagcta aacagagcgt |
| | 2881 | tgactggaat cgctgtagag caggataaga acacccaaga ggtattcgcg caagtcaagc |
| | 2941 | agatctataa gactccgccg atcaaggact tcggaggttt taacttctct cagatcttgc |
| | 3001 | cggatccgtc caaaccgtct aagagatctt tcatcgagga cctactattc aacaaagtca |
| | 3061 | ccctagctga cgcgggattc atcaaacaat acggagattg cttgggagac attgcggcga |
| | 3121 | gagatctaat ttgcgcgcag aagtttaacg gattgacagt actaccgccg ctactaaccg |
| | 3181 | atgagatgat tgcgcagtac acgtctgctc tattggcggg aacaattaca agtggatgga |
| | 3241 | catttggagc cggtgccgct ctacaaattc cgtttgctat gcaaatggcg tacagattca |
| | 3301 | acggaatcgg agtaacccag aacgtcttgt acgagaacca gaagctaatc gcgaaccagt |
| | 3361 | tcaattccgc gatcggaaag atccaggaca gtctatcttc tactgcttcg gcgttgggaa |
| | 3421 | agctacagga tgtagtaaat caaaacgcgc aggcgctaaa caccttggtc aagcaactat |
| | 3481 | cctctaactt cggagcgatc tcgtccgtcc taaacgacat cttatccaga ctagataagg |
| | 3541 | tcgaagcgga ggtccagatc gatagactaa tcactggaag attgcagtcc ctacagacct |
| | 3601 | acgtaacaca gcaactaatt agagcggcgg agattagagc ctctgctaat ctagctgcga |
| | 3661 | ccaagatgtc cgaatgtgtc ttgggacaat ccaagagagt cgacttttgc ggaaagggat |
| | 3721 | accacctaat gtcttttcca caatctgcgc cgcatggtgt cgtattccta catgtaacat |
| | 3781 | atgtgccggc gcaagaaaag aactttacaa cagctccagc gatctgccat gatggaaaag |
| | 3841 | ctcattttcc gagagaggga gtctttgtct ctaacggaac tcattggttc gtcacccaga |
| | 3901 | gaaactttta cgagccgcag atcatcacca ccgacaacac atttgtttcg ggaaactgcg |
| | 3961 | acgtggtcat cggaatcgta aacaataccg tctacgatcc gttgcagccg gaactagact |
| | 4021 | ccttcaaaga agagttggac aagtacttta agaaccacac ctctccggat gtcgacttgg |
| | 4081 | gagatatttc tggaatcaac gcgtccgtcg tcaacatcca gaaagaaatc gatagattga |
| | 4141 | acgaggtcgc gaagaacttg aacgagtccc taatcgacct acaagagcta ggaaaatacg |
| | 4201 | agcagtacat caagtggccg tggtacattt ggctaggatt cattgctgga ctaattgcga |
| | 4261 | tcgtcatggt caccatcatg ctatgctgta tgacctcctg ttgctcctgt ctaaagggat |
| | 4321 | gttgttcctg cggatcctgt tgcaagttcg atgaagatga tagtgaaccg gtcctaaagg |
| | 4381 | gtgtcaagct acactacaca taaaagcttg tcgactaaaa tagtttaact cttttaaaac |
| | 4441 | cagtttggta ctggaatttc agttcattac tcgttgagaa attgatgatt tttttaaaat |
| | 4501 | gatattactt ttatatgctt gcatcgcaga atgatattca caagtattat taaaaatgag |
| | 4561 | tatcggtagt tacattacca tatcatccat gctcatatgg atctccatcc attatataat |
| | 4621 | caatgataca tgtattaaaa tactttccga ataagtcttt taaatattgt attaattatg |
| | 4681 | aaaaactatg ctatgcgagt atgatgcaaa gatgtttaat gatacgatac tagattttat |
| | 4741 | ctctagcgag agatgtcgtt agaatcattt atcataacta cgtttaataa taattcatca |
| | 4801 | acgaatatcg ataacatgtg tcatttatac tttaaatacg ttaaagtctg tccgtcttct |
| | 4861 | ctattgttta gactgtttgt agaatgctgt gatataaaca aactagtaga aggta |
| Nucleotide sequence | 1 | atttacggat tcaccaataa aaataaacta gagaaactta gtactaataa ggaactagaa |
| of HPXV Delta TK | 61 | tcgtatagtt ctagccctct tcaagaaccc attaggttaa atgattttct gggactattg |
| Left Arm and Right Arm | 121 | gaatgtatta aaaagaatat tcctctaaca gatattccga caaaggattg attactataa |
| (SEQ ID NO: 62) | 181 | atggagaatg ttcctaatgt atactttaat cctgtgttta tagagcccac gtttaaacat |
| | 241 | tctttattaa gtgtttataa acacagatta atagttttat ttgaagtatt cattgtattc |
| | 301 | attctaatat atgtattttt tagatctgaa ttaaatatgt tcttcatgcc taaacgaaaa |
| | 361 | atacccgatc ctattgatag attacgacgt gctaatctag cgtgtgaaga cgataagtta |
| | 421 | atgatctatg gattaccatg gatgacaact caaacatctg cgttatcaat aaatagtaaa |
| | 481 | ccgatagtgt ataaagattg tgcaaagctt ttgcgatcaa taaatggatc acaaccagta |
| | 541 | tctcttaacg atgttcttcg cagatgatga ttcatttttt aagtatttgg ctagtcaaga |
| | 601 | tgatgaatct tcattatctg atatattgca aatcactcaa tatctagact ttctgttatt |
| | 661 | attattgatc caatcaaaaa ataaattaga agccgtgggt cattgttatg aatctctttc |
| | 721 | agaggaatac agacaattga caaaattcac agactttcaa gattttaaaa aactgtttaa |
| | 781 | caaggtccct attgttacag atggaagggt caaacttaat aaaggatatt tgttcgactt |
| | 841 | tgtgattagt ttgatgcgat tcaaaaaaga atcctctcta gctaccaccg caatagatcc |
| | 901 | tattagatac atagatcctc gtcgtgatat cgcattttct aacgtgatgg atatattaaa |
| | 961 | gttgaataaa gtgaacaata attaattctt tattgtcatc tattatattt tttatctaaa |
| | 1021 | aaactaaaaa taaacattga ttaaatttta atataatact taaaaatgga tgttgtgtcg |
| | 1081 | ttagataaac cgtttatgta ttttgaggaa attgataatg agttagatta cgaaccagaa |
| | 1141 | agtgcaaatg aggtcgcaaa aaaactaccg tatcaaggac agttaaaact attactagga |
| | 1201 | gaattatttt ttcttagtaa gttacagcga cacggtatat tagatggtgc caccgtagtg |
| | 1261 | tatataggat cggctcctgg tacacatata cgttatttga gagatcattt ctataattta |
| | 1321 | ggaatgatta tcaaatggat gctaattgac ggacgccatc atgatcctat tctaaatgga |
| | 1381 | ttgcgtgatg tgactctagt gactcggttc gttgatgagg aatatctacg atccatcaaa |
| | 1441 | aaacaactgc atccttctaa gattatttta atttctgatg taagatccaa acgaggagga |
| | 1501 | aatgaaccta gtacggcgga tttactaagt aattacgctc tacaaaatgt catgattagt |
| | 1561 | attttaaacc ccgtggcatc tagtcttaaa tggagatgcc cgtttccaga tcaatggatc |
| | 1621 | aaggactttt atatcccaca cggtaataaa atgttacaac cttttgctcc ttcatattca |
| | 1681 | gctgaaatga gattattaag tatttatacc ggtgagaaca tgagactgac tcgagttacc |
| | 1741 | aaattagacg ctgtaaatta tgaaaaaaag atgtactacc ttaataagat cgtccgtaac |
| | 1801 | aaagtagttg ttaactttga ttatcctaat caggaatatg actattttca catgtacttt |
| | 1861 | atgctgagga ccgtatactg caataaaaca tttcctacta ctaaagcaaa ggtactattt |
| | 1921 | ctacaacaat ctatatttcg tttcttaaat attccaacaa catcaactga aaaagttagt |
| | 1981 | catgaaccaa tacaacgtaa |
| Nucleotide sequence of | 1 | atttacggat tcaccaataa aaataaacta gagaaactta gtactaataa ggaactagaa |
| HPXV_COVID- | 61 | tcgtatagtt ctagccctct tcaagaaccc attaggttaa atgattttct gggactattg |
| 19_Spike_Delta_T5NT | 121 | gaatgtatta aaaagaatat tcctctaaca gatattccga caaaggattg attactataa |
| (SEQ ID NO: 63) | 181 | atggagaatg ttcctaatgt atactttaat cctgtgttta tagagcccac gtttaaacat |
| | 241 | tctttattaa gtgtttataa acacagatta atagttttat ttgaagtatt cattgtattc |
| | 301 | attctaatat atgtattttt tagatctgaa ttaaatatgt tcttcatgcc taaacgaaaa |
| | 361 | atacccgatc ctattgatag attacgacgt gctaatctag cgtgtgaaga cgataagtta |
| | 421 | atgatctatg gattaccatg gatgacaact caaacatctg cgttatcaat aaatagtaaa |
| | 481 | ccgatagtgt ataaagattg tgcaaagctt ttgcgatcaa taaatggatc acaaccagta |
| | 541 | tctcttaacg atgttcttcg cagatgatga ttcatttttt aagtatttgg ctagtcaaga |
| | 601 | tgatgaatct tcattatctg atatattgca aatcactcaa tatctagact ttctgttatt |
| | 661 | attattgatc caatcaaaaa ataaattaga agccgtgggt cattgttatg aatctctttc |
| | 721 | agaggaatac agacaattga caaaattcac agactttcaa gattttaaaa aactgtttaa |
| | 781 | caaggtccct attgttacag atggaagggt caaacttaat aaaggatatt tgttcgactt |
| | 841 | tgtgattagt ttgatgcgat tcaaaaaaga atcctctcta gctaccaccg caatagatcc |
| | 901 | tattagatac atagatcctc gtcgtgatat cgcattttct aacgtgatgg atatattaaa |
| | 961 | gttgaataaa gtgaacaata attaattctt tattgtcatc ttttattttt tttttttgga |
| | 1021 | atataaatat ccggtaaaat tgaaaaaata tacactaatt agcgtctcgt ttcagacgct |
| | 1081 | agctcgaggt tgggagctct ccggatccaa gcttatcgat ttcgaacccg gggtaccgaa |
| | 1141 | ttcctcgagg ttgggagctc tccggatcca agcttatcga tttcgaaccc ggggtaccga |
| | 1201 | attcctcgag atgtttgttt tccttgtttt attgccacta gtctctagtc agtgtgttaa |
| | 1261 | tcttacaacc agaactcaat taccccctgc atacactaat tctttcacac gtggtgttta |
| | 1321 | ttaccctgac aaagttttca gatcctcagt tttacattca actcaggact tgttcttacc |
| | 1381 | tttcttttcc aatgttactt ggttccatgc tatacatgtc tctgggacca atggtactaa |
| | 1441 | gaggtttgat aaccctgtcc taccatttaa tgatggtgtt tattttgctt ccactgagaa |
| | 1501 | gtctaacata ataagaggct ggatttttgg tactacttta gattcgaaga cccagtccct |
| | 1561 | acttattgtt aataacgcta ctaatgttgt tattaaagtc tgtgaatttc aattttgtaa |
| | 1621 | tgatccattt ttgggtgttt attaccacaa aaacaacaaa agttggatgg aaagtgagtt |
| | 1681 | cagagtttat tctagtgcga ataattgcac ttttgaatat gtctctcagc cttttcttat |
| | 1741 | ggaccttgaa ggaaaacagg gtaatttcaa aaatcttagg gaatttgtgt ttaagaatat |
| | 1801 | tgatggttat tttaaaatat attctaagca cacgcctatt aatttagtgc gtgatctccc |
| | 1861 | tcagggtttt tcggctttag aaccattggt agatttgcca ataggtatta acatcactag |
| | 1921 | gtttcaaact ttacttgctt tacatagaag ttatttgact cctggtgatt cttcttcagg |
| | 1981 | ttggacagct ggtgctgcag cttattatgt gggttatctt caacctagga cttttctatt |
| | 2041 | aaaatataat gaaaatggaa ccattacaga tgctgtagac tgtgcacttg accctctctc |
| | 2101 | agaaacaaag tgtacgttga aatccttcac tgtagaaaaa ggaatctatc aaacttctaa |
| | 2161 | ctttagagtc caaccaacag aatctattgt tagatttcct aatattacaa acttgtgccc |
| | 2221 | ttttggtgaa gtttttaacg ccaccagatt tgcatctgtt tatgcttgga acaggaagag |
| | 2281 | aatcagcaac tgtgttgctg attattctgt cctatataat tccgcatcat tttccacttt |
| | 2341 | taagtgttat ggagtgtctc ctactaaatt aaatgatctc tgctttacta atgtctatgc |
| | 2401 | agattcattt gtaattagag gtgatgaagt cagacaaatc gctccagggc aaactggaaa |
| | 2461 | gattgctgat tataattata aattaccaga tgattttaca ggctgcgtta tagcttggaa |
| | 2521 | ttctaacaat cttgattcta aggttggtgg taattataat tacctgtata gattgtttag |
| | 2581 | gaagtctaat ctcaaacctt ttgagagaga tatttcaact gaaatctatc aggccggtag |
| | 2641 | cacaccttgt aatggtgttg aaggttttaa ttgttacttt cctttacaat catatggttt |
| | 2701 | ccaacccact aatggtgttg gttaccaacc atacagagta gtagtacttt cttttgaact |
| | 2761 | tctacatgca ccagcaactg tttgtggacc taaaaagtct actaatttgg ttaaaaacaa |
| | 2821 | atgtgtcaat ttcaacttca atggtttaac aggcacaggt gttcttactg agtctaacaa |
| | 2881 | aaagtttctg cctttccaac aatttggcag agacattgct gacactactg atgctgtccg |
| | 2941 | tgatccacag acacttgaga ttcttgacat tacaccatgt tcttttggtg gtgtcagtgt |
| | 3001 | tataacacca ggaacaaata cttctaacca ggttgctgtt ctttatcagg atgttaactg |
| | 3061 | cacagaagtc cctgttgcta ttcatgcaga tcaacttact cctacttggc gtgtttattc |
| | 3121 | tacaggttct aatgtttttc aaacacgtgc aggctgttta ataggggctg aacatgtcaa |
| | 3181 | caactcatat gagtgtgaca tacccattgg tgcaggtata tgcgctagtt atcagactca |
| | 3241 | gactaattct cctcggcggg cacgtagtgt agctagtcaa tccatcattg cctacactat |
| | 3301 | gtcacttggt gcagaaaatt cagttgctta ctctaataac tctattgcca tacccacaaa |
| | 3361 | ttttactatt agtgttacca cagaaattct accagtgtct atgaccaaga catcagtaga |
| | 3421 | ttgtacaatg tacatttgtg gtgattcaac tgaatgcagc aatcttttgt tgcaatatgg |
| | 3481 | cagtttctgt acacaattaa accgtgcttt aactggaata gctgttgaac aagacaaaaa |
| | 3541 | cacccaagaa gtttttgcac aagtcaaaca aatttacaaa acaccaccaa ttaaagattt |
| | 3601 | tggtggtttt aatttttcac aaatattacc agatccatca aaaccaagca agaggtcatt |
| | 3661 | tattgaagat ctacttttca acaaagtgac acttgcagat gctggcttca tcaaacaata |
| | 3721 | tggtgattgc cttggtgata ttgctgctag agacctcatt tgtgcacaaa agtttaacgg |
| | 3781 | ccttactgtt ttgccacctt tgctcacaga tgaaatgatt gctcaataca cttctgcact |
| | 3841 | gttagcgggt acaatcactt ctggttggac ctttggtgca ggtgctgcat tacaaatacc |
| | 3901 | atttgctatg caaatggctt ataggtttaa tggtattgga gttacacaga atgttctcta |
| | 3961 | tgagaaccaa aaattgattg ccaaccaatt taatagtgct attggcaaaa ttcaagactc |
| | 4021 | actttcttcc acagcaagtg cacttggaaa acttcaagat gtggtcaacc aaaatgcaca |
| | 4081 | agctttaaac acgcttgtta aacaacttag ctccaatttt ggtgcaattt caagtgtttt |
| | 4141 | aaatgatatc ctttcacgtc ttgacaaagt tgaggctgaa gtgcaaattg ataggttgat |
| | 4201 | cacaggcaga cttcaaagtt tgcagacata tgtgactcaa caattaatta gagctgcaga |
| | 4261 | aatcagagct tctgctaatc ttgctgctac taaaatgtca gagtgtgtac ttggacaatc |
| | 4321 | aaaaagagtt gatttctgtg gaaagggcta tcatcttatg tccttccctc agtcagcacc |
| | 4381 | tcatggtgta gtcttcttgc atgtgactta tgtccctgca caagaaaaga acttcacaac |
| | 4441 | tgctcctgcc atttgtcatg atggaaaagc acactttcct cgtgaaggtg tctttgtttc |
| | 4501 | aaatggcaca cactggtttg taacacaaag gaacttttat gaaccacaaa tcattactac |
| | 4561 | agacaacaca tttgtgtctg gtaactgtga tgttgtaata ggaattgtca acaacacagt |
| | 4621 | ttatgatcct ttgcaacctg aattagactc attcaaggag gagttagata aatattttaa |
| | 4681 | gaatcataca tcaccagatg ttgatttagg tgacatctct ggcattaatg cttcagttgt |
| | 4741 | aaacattcaa aaagaaattg accgcctcaa tgaggttgcc aagaatttaa atgaatctct |
| | 4801 | catcgatctc caagaacttg gaaagtatga gcagtatata aaatggccat ggtacatttg |
| | 4861 | gctaggtttt atagctggct tgattgccat agtaatggtg acaattatgc tttgctgtat |
| | 4921 | gaccagttgc tgtagttgtc tcaagggctg ttgttcttgt ggatcctgct gcaaatttga |
| | 4981 | tgaagacgac tctgagccag tgctcaaagg agtcaaatta cattacacat aatattatat |
| | 5041 | tttttatcta aaaaactaaa aataaacatt gattaaattt taatataata cttaaaaatg |
| | 5101 | gatgttgtgt cgttagataa accgtttatg tattttgagg aaattgataa tgagttagat |
| | 5161 | tacgaaccag aaagtgcaaa tgaggtcgca aaaaaactac cgtatcaagg acagttaaaa |
| | 5221 | ctattactag gagaattatt ttttcttagt aagttacagc gacacggtat attagatggt |
| | 5281 | gccaccgtag tgtatatagg atcggctcct ggtacacata tacgttattt gagagatcat |
| | 5341 | ttctataatt taggaatgat tatcaaatgg atgctaattg acggacgcca tcatgatcct |
| | 5401 | attctaaatg gattgcgtga tgtgactcta gtgactcggt tcgttgatga ggaatatcta |
| | 5461 | cgatccatca aaaaacaact gcatccttct aagattattt taatttctga tgtaagatcc |
| | 5521 | aaacgaggag gaaatgaacc tagtacggcg gatttactaa gtaattacgc tctacaaaat |
| | 5581 | gtcatgatta gtattttaaa ccccgtggca tctagtctta aatggagatg cccgtttcca |
| | 5641 | gatcaatgga tcaaggactt ttatatccca cacggtaata aaatgttaca accttttgct |
| | 5701 | ccttcatatt cagctgaaat gagattatta agtatttata ccggtgagaa catgagactg |
| | 5761 | actcgagtta ccaaattaga cgctgtaaat tatgaaaaaa agatgtacta ccttaataag |
| | 5821 | atcgtccgta acaaagtagt tgttaacttt gattatccta atcaggaata tgactatttt |
| | 5881 | cacatgtact ttatgctgag gaccgtatac tgcaataaaa catttcctac tactaaagca |
| | 5941 | aaggtactat ttctacaaca atctatattt cgtttcttaa atattccaac aacatcaact |
| | 6001 | gaaaaagtta gtcatgaacc aatacaacgt aa |
| Nucleotide sequence of | 1 | atttacggat tcaccaataa aaataaacta gagaaactta gtactaataa ggaactagaa |
| HPXV_SARS_Ad_Spike_Delta_T5NT | 61 | tcgtatagtt ctagccctct tcaagaaccc attaggttaa atgattttct gggactattg |
| (SEQ ID NO: 64) | 121 | gaatgtatta aaaagaatat tcctctaaca gatattccga caaaggattg attactataa |
| | 181 | atggagaatg ttcctaatgt atactttaat cctgtgttta tagagcccac gtttaaacat |
| | 241 | tctttattaa gtgtttataa acacagatta atagttttat ttgaagtatt cattgtattc |
| | 301 | attctaatat atgtattttt tagatctgaa ttaaatatgt tcttcatgcc taaacgaaaa |
| | 361 | atacccgatc ctattgatag attacgacgt gctaatctag cgtgtgaaga cgataagtta |
| | 421 | atgatctatg gattaccatg gatgacaact caaacatctg cgttatcaat aaatagtaaa |
| | 481 | ccgatagtgt ataaagattg tgcaaagctt ttgcgatcaa taaatggatc acaaccagta |
| | 541 | tctcttaacg atgttcttcg cagatgatga ttcatttttt aagtatttgg ctagtcaaga |
| | 601 | tgatgaatct tcattatctg atatattgca aatcactcaa tatctagact ttctgttatt |
| | 661 | attattgatc caatcaaaaa ataaattaga agccgtgggt cattgttatg aatctctttc |
| | 721 | agaggaatac agacaattga caaaattcac agactttcaa gattttaaaa aactgtttaa |
| | 781 | caaggtccct attgttacag atggaagggt caaacttaat aaaggatatt tgttcgactt |
| | 841 | tgtgattagt ttgatgcgat tcaaaaaaga atcctctcta gctaccaccg caatagatcc |
| | 901 | tattagatac atagatcctc gtcgtgatat cgcattttct aacgtgatgg atatattaaa |
| | 961 | gttgaataaa gtgaacaata attaattctt tattgtcatc ttttattttt tttttttgga |
| | 1021 | atataaatat ccggtaaaat tgaaaaaata tacactaatt agcgtctcgt ttcagacgct |
| | 1081 | agctcgaggt tgggagctct ccggatccaa gcttatcgat ttcgaacccg gggtaccgaa |
| | 1141 | ttcctcgagg ttgggagctc tccggatcca agcttatcga tttcgaaccc ggggtaccga |
| | 1201 | attcctcgag atgtttattt tcttattatt tcttactctc actagtggta gtgaccttga |
| | 1261 | ccggtgcacc acttttgatg atgttcaagc tcctaattac actcaacata cttcatctat |
| | 1321 | gaggggggtt tactatcctg atgaaatttt tagatcagac actctttatt taactcagga |
| | 1381 | tttatttctt ccattttatt ctaatgttac agggtttcat actattaatc atacgtttgg |
| | 1441 | caaccctgtc atacctttta aggatggtat ttattttgct gccacagaga aatcaaatgt |
| | 1501 | tgtccgtggt tgggtttttg gttctaccat gaacaacaag tcacagtcgg tgattattat |
| | 1561 | taacaattct actaatgttg ttatacgagc atgtaacttt gaattgtgtg acaacccttt |
| | 1621 | ctttgctgtt tctaaaccca tgggtacaca gacacatact atgatattcg ataatgcatt |
| | 1681 | taattgcact ttcgagtaca tatctgatgc cttttcgctt gatgtttcag aaaagtcagg |
| | 1741 | taattttaaa cacttacgag agtttgtgtt taaaaataaa gatgggtttc tctatgttta |
| | 1801 | taagggctat caacctatag atgtagttcg tgatctacct tctggtttta acactttgaa |
| | 1861 | acctattttt aagttgcctc ttggtattaa cattacaaat tttagagcca ttcttacagc |
| | 1921 | cttttcacct gctcaagaca tttggggcac gtcagctgca gcctattttg ttggctattt |
| | 1981 | aaagccaact acatttatgc tcaagtatga tgaaaatggt acaatcacag atgctgttga |
| | 2041 | ttgttctcaa aatccacttg ctgaactcaa atgctctgtt aagagctttg agattgacaa |
| | 2101 | aggaatttac cagacctcta atttcagggt tgttccctca ggagatgttg tgagattccc |
| | 2161 | taatattaca aacttgtgtc cttttggaga ggtttttaat gctactaaat tcccttctgt |
| | 2221 | ctatgcatgg gagagaaaaa aaatttctaa ttgtgttgct gattactctg tgctctacaa |
| | 2281 | ctcaacattc ttttcaacct ttaagtgcta tggcgtttct gccactaagt tgaatgatct |
| | 2341 | ttgcttctcc aatgtctatg cagattcttt tgtagtcaag ggagatgatg taagacaaat |
| | 2401 | agcgccagga caaactggtg ttattgctga ttataattat aaattgccag atgatttcat |
| | 2461 | gggttgtgtc cttgcttgga atactaggaa cattgatgct acttcaactg gtaatcataa |
| | 2521 | ttataaatat aggtatctta gacatggcaa gcttaggccc tttgagagag acatatctaa |
| | 2581 | tgtgcctttc tcccctgatg gcaaaccttg caccccacct gctcttaatt gttattggcc |
| | 2641 | attaaatgat tatggttttt acaccactac tggcattggc taccaacctt acagagttgt |
| | 2701 | agtactttct tttgaacttt taaatgcacc ggccacggtt tgtggaccaa aattatccac |
| | 2761 | tgaccttatt aagaaccagt gtgtcaattt taattttaat ggactcactg gtactggtgt |
| | 2821 | gttaactcct tcttcaaaga gatttcaacc atttcaacaa tttggccgtg atgtttctga |
| | 2881 | tttcactgat tccgttcgag atcctaaaac atctgaaata ttagacattt caccttgctc |
| | 2941 | ttttgggggt gtaagtgtaa ttacacctgg aacaaatgct tcatctgaag ttgctgttct |
| | 3001 | atatcaagat gttaactgca ctgatgtttc tacagcaatt catgcagatc aactcacacc |
| | 3061 | agcttggcgc atatattcta ctggaaacaa tgtattccag actcaagcag gctgtcttat |
| | 3121 | aggagctgag catgtcgaca cttcttatga gtgcgacatt cctattggag ctggcatttg |
| | 3181 | tgctagttac catacagttt ctttattacg tagtactagc caaaaatcta ttgtggctta |
| | 3241 | tactatgtct ttaggtgctg atagttcaat tgcttactct aataacacca ttgctatacc |
| | 3301 | tactaacttt tcaattagca ttactacaga agtaatgcct gtttctatgg ctaaaacctc |
| | 3361 | cgtagattgt aatatgtaca tctgcggaga ttctactgaa tgtgctaatt tgcttctcca |
| | 3421 | atatggtagc ttttgcacac aactaaatcg tgcactctca ggtattgctg ctgaacagga |
| | 3481 | tcgcaacaca cgtgaagtgt tcgctcaagt caaacaaatg tacaaaaccc caactttgaa |
| | 3541 | atattttggt ggttttaatt tttcacaaat attacctgac cctctaaagc caactaagag |
| | 3601 | gtcttttatt gaggacttgc tctttaataa ggtgacactc gctgatgctg gcttcatgaa |
| | 3661 | gcaatatggc gaatgcctag gtgatattaa tgctagagat ctcatttgtg cgcagaagtt |
| | 3721 | caatggactt acagtgttgc cacctctgct cactgatgat atgattgctg cctacactgc |
| | 3781 | tgctctagtt agtggtactg ccactgctgg atggacattt ggtgctggcg ctgctcttca |
| | 3841 | aatacctttt gctatgcaaa tggcatatag gttcaatggc attggagtta cccaaaatgt |
| | 3901 | tctctatgag aaccaaaaac aaatcgccaa ccaatttaac aaggcgatta gtcaaattca |
| | 3961 | agaatcactt acaacaacat caactgcatt gggcaagctg caagacgttg ttaaccagaa |
| | 4021 | tgctcaagca ttaaacacac ttgttaaaca acttagctct aattttggtg caatttcaag |
| | 4081 | tgtgctaaat gatatccttt cgcgacttga taaagtcgag gcggaggtac aaattgacag |
| | 4141 | gttaattaca ggcagacttc aaagccttca aacctatgta acacaacaac taatcagggc |
| | 4201 | tgctgaaatc agggcttctg ctaatcttgc tgctactaaa atgtctgagt gtgttcttgg |
| | 4261 | acaatcaaaa agagttgact tttgtggaaa gggctaccac cttatgtcct tcccacaagc |
| | 4321 | agccccgcat ggtgttgtct tcctacatgt cacgtatgtg ccatcccagg agaggaactt |
| | 4381 | caccacagcg ccagcaattt gtcatgaagg caaagcatac ttccctcgtg aaggtgtttt |
| | 4441 | cgtgtttaat ggcacttctt ggtttattac acagaggaac ttcttttctc cacaaataat |
| | 4501 | tactacagac aatacatttg tctcaggaaa ttgtgatgtc gttattggca tcattaacaa |
| | 4561 | cacagtttat gatcctctgc aacctgagct cgactcattc aaagaagagc tggacaagta |
| | 4621 | cttcaaaaat catacatcac cagatgttga tcttggcgac atttcaggca ttaacgcttc |
| | 4681 | tgtcgtcaac attcaaaaag aaattgaccg cctcaatgag gtcgctaaaa atttaaatga |
| | 4741 | atcactcatt gaccttcaag aattgggaaa atatgagcaa tatattaaat ggccttggta |
| | 4801 | tgtttggctc ggcttcattg ctggactaat tgccatcgtc atggttacaa tcttgctttg |
| | 4861 | ttgcatgact agttgttgca gttgcctcaa gggtgcatgc tcttgtggtt cttgctgcaa |
| | 4921 | gtttgatgag gatgactctg agccagttct caagggtgtc aaattacatt acacataata |
| | 4981 | ttatattttt tatctaaaaa actaaaaata aacattgatt aaattttaat ataatactta |
| | 5041 | aaaatggatg ttgtgtcgtt agataaaccg tttatgtatt ttgaggaaat tgataatgag |
| | 5101 | ttagattacg aaccagaaag tgcaaatgag gtcgcaaaaa aactaccgta tcaaggacag |
| | 5161 | ttaaaactat tactaggaga attatttttt cttagtaagt tacagcgaca cggtatatta |
| | 5221 | gatggtgcca ccgtagtgta tataggatcg gctcctggta cacatatacg ttatttgaga |
| | 5281 | gatcatttct ataatttagg aatgattatc aaatggatgc taattgacgg acgccatcat |
| | 5341 | gatcctattc taaatggatt gcgtgatgtg actctagtga ctcggttcgt tgatgaggaa |
| | 5401 | tatctacgat ccatcaaaaa acaactgcat ccttctaaga ttattttaat ttctgatgta |
| | 5461 | agatccaaac gaggaggaaa tgaacctagt acggcggatt tactaagtaa ttacgctcta |
| | 5521 | caaaatgtca tgattagtat tttaaacccc gtggcatcta gtcttaaatg gagatgcccg |
| | 5581 | tttccagatc aatggatcaa ggacttttat atcccacacg gtaataaaat gttacaacct |
| | 5641 | tttgctcctt catattcagc tgaaatgaga ttattaagta tttataccgg tgagaacatg |
| | 5701 | agactgactc gagttaccaa attagacgct gtaaattatg aaaaaaagat gtactacctt |
| | 5761 | aataagatcg tccgtaacaa agtagttgtt aactttgatt atcctaatca ggaatatgac |
| | 5821 | tattttcaca tgtactttat gctgaggacc gtatactgca ataaaacatt tcctactact |
| | 5881 | aaagcaaagg tactatttct acaacaatct atatttcgtt tcttaaatat tccaacaaca |
| | 5941 | tcaactgaaa aagttagtca tgaaccaata caacgtaa |
| Nucleotide sequence of | 1 | atttacggat tcaccaataa aaataaacta gagaaactta gtactaataa ggaactagaa |
| synVACV_SARS_Ad_Spike_deltaT5NT | 61 | tcgtatagtt ctagccctct tcaagaaccc attaggttaa atgattttct gggactattg |
| (SEQ ID NO: 65) | 121 | gaatgtgtta aaaagaatat tcctctaaca gatattccga caaaggattg attactataa |
| | 181 | atggagaatg ttcctaatgt atactttaat cctgtgttta tagagcccac gtttaaacat |
| | 241 | tctttattaa gtgtttataa acacagatta atagttttat ttgaagtatt cgttgtattc |
| | 301 | attctaatat atgtattttt tagatctgaa ttaaatatgt tcttcatgcc taaacgaaaa |
| | 361 | atacccgatc ctattgatag attacgacgt gctaatctag cgtgtgaaga cgataaatta |
| | 421 | atgatctatg gattaccatg gatgacaact caaacatctg cgttatcaat aaatagtaaa |
| | 481 | ccgatagtgt ataaagattg tgcaaagctt ttgcgatcaa taaatggatc acaaccagta |
| | 541 | tctcttaacg atgttcttcg cagatgatga ttcatttttt aagtatttgg ctagtcaaga |
| | 601 | tgatgaatct tcattatctg atatattgca aatcactcaa tatctagact ttctgttatt |
| | 661 | attattgatc caatcaaaaa ataaattaga agccgtgggt cattgttatg aatctctttc |
| | 721 | agaggaatac agacaattga caaaattcac agactctcaa gattttaaaa aactgtttaa |
| | 781 | caaggtccct attgttacag atggaagggt caaacttaat aaaggatatt tgttcgactt |
| | 841 | tgtgattagt ttgatgcgat tcaaaaaaga atcagctcta gctaccaccg caatagatcc |
| | 901 | tgttagatac atagatcctc gtcgcgatat cgcattttct aacgtgatgg atatattaaa |
| | 961 | gtcgaataaa gtgaacaata attaattctt tattgtcatc ttttattttt tttttttgga |
| | 1021 | atataaatat ccggtaaaat tgaaaaaata tacactaatt agcgtctcgt ttcagacgct |
| | 1081 | agctcgaggt tgggagctct ccggatccaa gcttatcgat ttcgaacccg gggtaccgaa |
| | 1141 | ttcctcgagg ttgggagctc tccggatcca agcttatcga tttcgaaccc ggggtaccga |
| | 1201 | attcctcgag atgtttattt tcttattatt tcttactctc actagtggta gtgaccttga |
| | 1261 | ccggtgcacc acttttgatg atgttcaagc tcctaattac actcaacata cttcatctat |
| | 1321 | gaggggggtt tactatcctg atgaaatttt tagatcagac actctttatt taactcagga |
| | 1381 | tttatttctt ccattttatt ctaatgttac agggtttcat actattaatc atacgtttgg |
| | 1441 | caaccctgtc atacctttta aggatggtat ttattttgct gccacagaga aatcaaatgt |
| | 1501 | tgtccgtggt tgggtttttg gttctaccat gaacaacaag tcacagtcgg tgattattat |
| | 1561 | taacaattct actaatgttg ttatacgagc atgtaacttt gaattgtgtg acaacccttt |
| | 1621 | ctttgctgtt tctaaaccca tgggtacaca gacacatact atgatattcg ataatgcatt |
| | 1681 | taattgcact ttcgagtaca tatctgatgc cttttcgctt gatgtttcag aaaagtcagg |
| | 1741 | taattttaaa cacttacgag agtttgtgtt taaaaataaa gatgggtttc tctatgttta |
| | 1801 | taagggctat caacctatag atgtagttcg tgatctacct tctggtttta acactttgaa |
| | 1861 | acctattttt aagttgcctc ttggtattaa cattacaaat tttagagcca ttcttacagc |
| | 1921 | cttttcacct gctcaagaca tttggggcac gtcagctgca gcctattttg ttggctattt |
| | 1981 | aaagccaact acatttatgc tcaagtatga tgaaaatggt acaatcacag atgctgttga |
| | 2041 | ttgttctcaa aatccacttg ctgaactcaa atgctctgtt aagagctttg agattgacaa |
| | 2101 | aggaatttac cagacctcta atttcagggt tgttccctca ggagatgttg tgagattccc |
| | 2161 | taatattaca aacttgtgtc cttttggaga ggtttttaat gctactaaat tcccttctgt |
| | 2221 | ctatgcatgg gagagaaaaa aaatttctaa ttgtgttgct gattactctg tgctctacaa |
| | 2281 | ctcaacattc ttttcaacct ttaagtgcta tggcgtttct gccactaagt tgaatgatct |
| | 2341 | ttgcttctcc aatgtctatg cagattcttt tgtagtcaag ggagatgatg taagacaaat |
| | 2401 | agcgccagga caaactggtg ttattgctga ttataattat aaattgccag atgatttcat |
| | 2461 | gggttgtgtc cttgcttgga atactaggaa cattgatgct acttcaactg gtaatcataa |
| | 2521 | ttataaatat aggtatctta gacatggcaa gcttaggccc tttgagagag acatatctaa |
| | 2581 | tgtgcctttc tcccctgatg gcaaaccttg caccccacct gctcttaatt gttattggcc |
| | 2641 | attaaatgat tatggttttt acaccactac tggcattggc taccaacctt acagagttgt |
| | 2701 | agtactttct tttgaacttt taaatgcacc ggccacggtt tgtggaccaa aattatccac |
| | 2761 | tgaccttatt aagaaccagt gtgtcaattt taattttaat ggactcactg gtactggtgt |
| | 2821 | gttaactcct tcttcaaaga gatttcaacc atttcaacaa tttggccgtg atgtttctga |
| | 2881 | tttcactgat tccgttcgag atcctaaaac atctgaaata ttagacattt caccttgctc |
| | 2941 | ttttgggggt gtaagtgtaa ttacacctgg aacaaatgct tcatctgaag ttgctgttct |
| | 3001 | atatcaagat gttaactgca ctgatgtttc tacagcaatt catgcagatc aactcacacc |
| | 3061 | agcttggcgc atatattcta ctggaaacaa tgtattccag actcaagcag gctgtcttat |
| | 3121 | aggagctgag catgtcgaca cttcttatga gtgcgacatt cctattggag ctggcatttg |
| | 3181 | tgctagttac catacagttt ctttattacg tagtactagc caaaaatcta ttgtggctta |
| | 3241 | tactatgtct ttaggtgctg atagttcaat tgcttactct aataacacca ttgctatacc |
| | 3301 | tactaacttt tcaattagca ttactacaga agtaatgcct gtttctatgg ctaaaacctc |
| | 3361 | cgtagattgt aatatgtaca tctgcggaga ttctactgaa tgtgctaatt tgcttctcca |
| | 3421 | atatggtagc ttttgcacac aactaaatcg tgcactctca ggtattgctg ctgaacagga |
| | 3481 | tcgcaacaca cgtgaagtgt tcgctcaagt caaacaaatg tacaaaaccc caactttgaa |
| | 3541 | atattttggt ggttttaatt tttcacaaat attacctgac cctctaaagc caactaagag |
| | 3601 | gtcttttatt gaggacttgc tctttaataa ggtgacactc gctgatgctg gcttcatgaa |
| | 3661 | gcaatatggc gaatgcctag gtgatattaa tgctagagat ctcatttgtg cgcagaagtt |
| | 3721 | caatggactt acagtgttgc cacctctgct cactgatgat atgattgctg cctacactgc |
| | 3781 | tgctctagtt agtggtactg ccactgctgg atggacattt ggtgctggcg ctgctcttca |
| | 3841 | aatacctttt gctatgcaaa tggcatatag gttcaatggc attggagtta cccaaaatgt |
| | 3901 | tctctatgag aaccaaaaac aaatcgccaa ccaatttaac aaggcgatta gtcaaattca |
| | 3961 | agaatcactt acaacaacat caactgcatt gggcaagctg caagacgttg ttaaccagaa |
| | 4021 | tgctcaagca ttaaacacac ttgttaaaca acttagctct aattttggtg caatttcaag |
| | 4081 | tgtgctaaat gatatccttt cgcgacttga taaagtcgag gcggaggtac aaattgacag |
| | 4141 | gttaattaca ggcagacttc aaagccttca aacctatgta acacaacaac taatcagggc |
| | 4201 | tgctgaaatc agggcttctg ctaatcttgc tgctactaaa atgtctgagt gtgttcttgg |
| | 4261 | acaatcaaaa agagttgact tttgtggaaa gggctaccac cttatgtcct tcccacaagc |
| | 4321 | agccccgcat ggtgttgtct tcctacatgt cacgtatgtg ccatcccagg agaggaactt |
| | 4381 | caccacagcg ccagcaattt gtcatgaagg caaagcatac ttccctcgtg aaggtgtttt |
| | 4441 | cgtgtttaat ggcacttctt ggtttattac acagaggaac ttcttttctc cacaaataat |
| | 4501 | tactacagac aatacatttg tctcaggaaa ttgtgatgtc gttattggca tcattaacaa |
| | 4561 | cacagtttat gatcctctgc aacctgagct cgactcattc aaagaagagc tggacaagta |
| | 4621 | cttcaaaaat catacatcac cagatgttga tcttggcgac atttcaggca ttaacgcttc |
| | 4681 | tgtcgtcaac attcaaaaag aaattgaccg cctcaatgag gtcgctaaaa atttaaatga |
| | 4741 | atcactcatt gaccttcaag aattgggaaa atatgagcaa tatattaaat ggccttggta |
| | 4801 | tgtttggctc ggcttcattg ctggactaat tgccatcgtc atggttacaa tcttgctttg |
| | 4861 | ttgcatgact agttgttgca gttgcctcaa gggtgcatgc tcttgtggtt cttgctgcaa |
| | 4921 | gtttgatgag gatgactctg agccagttct caagggtgtc aaattacatt acacataata |
| | 4981 | ttatattttt tatctaaaaa actaaaaata aacattgatt aaattttaat ataatactta |
| | 5041 | aaaatggatg ttgtgtcgtt agataaaccg tttatgtatt ttgaggaaat tgataatgag |
| | 5101 | ttagattacg aaccagaaag tgcaaatgag gtcgcaaaaa aactgccgta tcaaggacag |
| | 5161 | ttaaaactat tactaggaga attatttttt cttagtaagt tacagcgaca cggtatatta |
| | 5221 | gatggtgcca ccgtagtgta tataggatct gctcccggta cacatatacg ttatttgaga |
| | 5281 | gatcatttct ataatttagg agtgatcatc aaatggatgc taattgacgg ccgccatcat |
| | 5341 | gatcctattt taaatggatt gcgtgatgtg actctagtga ctcggttcgt tgatgaggaa |
| | 5401 | tatctacgat ccatcaaaaa acaactgcat ccttctaaga ttattttaat ttctgatgtg |
| | 5461 | agatccaaac gaggaggaaa tgaacctagt acggcggatt tactaagtaa ttacgctcta |
| | 5521 | caaaatgtca tgattagtat tttaaacccc gtggcatcta gtcttaaatg gagatgcccg |
| | 5581 | tttccagatc aatggatcaa ggacttttat atcccacacg gtaataaaat gttacaacct |
| | 5641 | tttgctcctt catattcagc tgaaatgaga ttattaagta tttataccgg tgagaacatg |
| | 5701 | agactgactc gagttaccaa attagacgct gtaaattatg aaaaaaagat gtactacctt |
| | 5761 | aataagatcg tccgtaacaa agtagttgtt aactttgatt atcctaatca ggaatatgac |
| | 5821 | tattttcaca tgtactttat gctgaggacc gtgtactgca ataaaacatt tcctactact |
| | 5881 | aaagcaaagg tactatttct acaacaatct atatttcgtt tcttaaatat tccaacaaca |
| | 5941 | tcaactgaaa aagttagtca tgaaccaata caacgtaa |

### Examples

### Example 1. Generation of the Synthetic Horsepox Virus

[0123] The synthetic horsepox virus (scHPXV) is generated following the methods disclosed in US 2018/0251736, incorporated herein by reference in its entirety.

[0124] The design of the synthetic HPXV genome is based on the previously described genome sequence for HPXV (strain MNR-76; GenBank accession DQ792504) (Tulman E R, Delhon G, Afonso C L, Lu Z, Zsak L, Sandybaev N T, et al. Genome of horsepox virus. Journal of virology. 2006; 80(18):9244-58). The 212,633 bp genome is divided into 10 overlapping fragments. These fragments are designed so that they shared at least 1.0 kbp of overlapping sequence (i.e. homology) with each adjacent fragment, to provide sites where homologous recombination will drive the assembly of full-length genomes. The fragments generated are shown in Table 2. These overlapping sequences will provide sufficient homology to accurately carry out recombination between the co-transfected fragments

TABLE 2
HPXV genome fragments for use to generate the
synthetic HPXV. The size of each fragment and
location within the HPXV genome are indicated.

| | | Location within |
|---|---|---|
| | | HPXV [DQ792504] |
| Fragment Name | Size (bp) | (bp) |
| GA_Left ITR (SEQ ID NO: 15) | 10,095 | 41-10,135 |
| GA_Fragment 1A (SEQ ID NO: 16) | 16,257 | 8505-24,761 |
| GA_Fragment 1B (SEQ ID NO: 17) | 16,287 | 23764-40,050 |
| GA_Fragment 2 (SEQ ID NO: 18) | 31,946 | 38,705-70,650 |
| GA_Fragment 3 (SEQ ID NO: 19) | 25,566 | 68,608-94,173 |
| GA_Fragment 4 (SEQ ID NO: 20) | 28,662 | 92,587-121,248 |
| GA_Fragment 5 (SEQ ID NO: 21) | 30,252 | 119,577-149,828 |
| GA_Fragment 6 (SEQ ID NO: 22) | 30,000 | 147,651-177,650 |
| GA_Fragment 7 (SEQ ID NO: 23) | 28,754 | 176,412-205,165 |
| GA_Right ITR (SEQ ID NO: 24) | 8,484 | 204,110-212,593 |

[0125] The resulting synthetic HPXV has been deposited in GenBank as accession number KY349117.

[0126] A yfp/gpt cassette under the control of a poxvirus early late promoter is introduced into the HPXV095/J2R locus within GA_Fragment_3, so that reactivation of HPXV (scHPXV YFP-gpt::095) will be easy to visualize under a fluorescence microscope. SFV-catalyzed recombination and reactivation of poxvirus DNA to assemble recombinant poxviruses has previously been described (Yao X D et al. Journal of virology. 2003; 77(13):7281-90; and Yao X D et al. Methods Mol Biol. 2004; 269:51-64; the entire disclosures of each are incorporated by reference herein). Several biological features make this an attractive model system. First, SFV has a narrow host range, productively infecting rabbit cells and certain monkey cell lines, like BGMK. It can infect, but grows very poorly on cells like BSC-40. Second, it grows more slowly compared to Orthopoxviruses, taking approximately 4-5 days to form transformed “foci” in monolayers of cells, a characteristic that is very different from Orthopoxviruses, which produce plaques within 1-2 days in culture. This difference in growth between Leporipoxviruses and Orthopoxviruses allows differentiation of these viruses by performing the reactivation assays in BGMK cells and plating the progeny on BSC-40 cells. In some embodiments, other helper viruses (such as, but not limited to, fowlpox virus) may be used. In some embodiments, different cell combinations may be used.

[0127] BGMK cells are infected with SFV at a MOI of 0.5 and then transfected with 5 μg of digested GA_HPXV fragments 2 h later. Five days post transfection, all of the infectious particles are recovered by cell lysis and re-plated on BSC-40 cells, which only efficiently support growth of HPXV. The resulting reactivated scHPXV YFP-gpt::095 plaques are visualized under a fluorescence microscope. The visualization is enabled by the yfp/gpt selectable marker in the HPXV095/J2R locus within Frag_3. Virus plaques are detected in BSC-40 monolayers within 48 h of transfection. The efficiency of recovering scHPXV YFP-gpt::095 is dependent on a number of factors, including DNA transfection efficiency, but ranges up to a few PFU/μg of DNA transfected.

[0128] A yfp/gpt cassette under the control of a poxvirus early late promoter is also introduced into the HPXV200 locus within GA_Fragment_7, so that reactivation of HPXV (scHPXV YFP-gpt::200) will be easy to visualize under a fluorescence microscope. SFV-catalyzed recombination and reactivation of poxvirus DNA to assemble recombinant poxviruses has previously been described (Yao X D et al. Journal of virology. 2003; 77(13):7281-90; and Yao X D et al. Methods Mol Biol. 2004; 269:51-64; the entire disclosures of each are incorporated by reference herein). Several biological features make this an attractive model system. First, SFV has a narrow host range, productively infecting rabbit cells and certain monkey cell lines, like BGMK. It can infect, but grows very poorly on cells like BSC-40. Second, it grows more slowly compared to Orthopoxviruses, taking approximately 4-5 days to form transformed “foci” in monolayers of cells, a characteristic that is very different from Orthopoxviruses, which produce plaques within 1-2 days in culture. This difference in growth between Leporipoxviruses and Orthopoxviruses allows differentiation of these viruses by performing the reactivation assays in BGMK cells and plating the progeny on BSC-40 cells. In some embodiments, other helper viruses (such as, but not limited to, fowlpox virus) may be used. In some embodiments, different cell combinations may be used.

[0129] BGMK cells are infected with SFV at a MOI of 0.5 and then transfected with 5 μg of digested GA_HPXV fragments 2 hours later. Five days post transfection, all of the infectious particles are recovered by cell lysis and re-plated on BSC-40 cells, which only efficiently support growth of HPXV. The resulting reactivated scHPXV YFP-gpt::200 plaques are visualized under a fluorescence microscope. The visualization is enabled by the yfp/gpt selectable marker in the HPXV200 locus within Frag_7. Virus plaques are detected in BSC-40 monolayers within 48 hours of transfection. The efficiency of recovering scHPXV YFP-gpt::200 is dependent on a number of factors, including DNA transfection efficiency, but ranges up to a few PFU/μg of DNA transfected.

### Example 2. Generation of the Synthetic Vaccinia Virus, Strain ACAM2000

[0130] The synthetic vaccinia virus ACAM2000 was generated using the methods disclosed in WO 2019/213452, incorporated herein by reference in its entirety.

[0131] The design of the synthetic VACV (synVACV) genome was based on the previously described genome sequence for VACV ACAM2000 (GenBank accession AY313847) (Osborne J D et al. Vaccine. 2007; 25(52):8807-32). The genome was divided into 9 overlapping fragments (FIG. 1). These fragments were designed so that they shared at least 1.0 kbp of overlapping sequence (i.e. homology) with each adjacent fragment, to provide sites where homologous recombination will drive the assembly of full-length genomes (Table 3). These overlapping sequences provided sufficient homology to accurately carry out recombination between the co-transfected fragments (Yao X D, Evans D H. Journal of Virology. 2003; 77(13):7281-90).

TABLE 3
The VACV ACAM2000 genome fragments used in this study.
The size and the sequence within the VACV ACAM2000
genome [GenBank Accession AY313847] are described.

| Fragment Name | Size (bp) | Sequence |
|---|---|---|
| GA_LITR | 18,525 | SEQ ID NO: 25 |
| ACAM2000 | | |
| GA_FRAG_1 | 24,931 | SEQ ID NO: 26 |
| ACAM2000 | | |
| GA_FRAG_2 | 23,333 | SEQ ID NO: 27 |
| ACAM2000 | | |
| GA_FRAG_3 | 26,445 | SEQ ID NO: 28 |
| ACAM2000 | | |
| GA_FRAG_4 | 26,077 | SEQ ID NO: 29 |
| ACAM2000 | | |
| GA_FRAG_5 | 24,671 | SEQ ID NO: 30 |
| ACAM2000 | | |
| GA_FRAG_6 | 25,970 | SEQ ID NO: 31 |
| ACAM2000 | | |
| GA_FRAG_7 | 28,837 | SEQ ID NO: 32 |
| ACAM2000 | | |
| GA_RITR | 17,641 | SEQ ID NO: 33 |
| ACAM2000 | | |

[0132] The resulting synthetic VACV, ACAM 2000 has been deposited in GenBank as accession number MN974381.

### Example 3. Generation of the Engineered SARS-CoV-2 S Protein

[0133] The nucleotide sequence alignment of the synthetic HPXV (Accession number KY349117) and the synthetic VACV (Accession number MN974381) indicates a nucleotide sequence identity of 99% throughout the 4 Kb TK gene locus and a co-linearity (Start and Stop) of the TK gene sequences, which were used for the construction of the ΔTK insertion locus or knockout TK locus. See FIG. 3.

[0134] The TK gene is non-essential for viral replication in tissue culture. It also provides a stable insertion site for foreign gene(s) of interest and a selection marker (TK−) in the presence of the nucleotide analog 5-Bromodeoxyuridine (5-BrdU).

[0135] Because of the high level of sequence identity between the synthetic HPXV and the synthetic VACV, the PCR sequence manipulations used for the generation of the expression cassette containing the promoter/gene sequences allow for the use of the same expression cassette with the two different rescue viruses. For the rescue of the transfected PCR fragment comprising the engineered SARS-CoV-2 S protein, virus specific sequences (recombination left and right flanking arms, corresponding to HPXV094 and HPXV096, respectively) allows the recombination of the expression cassette into the viral TK locus. See FIG. 2 and FIG. 5.

[0136] A nucleotide sequence alignment of the Spike (S) gene of different SARS-CoV-2 isolates is performed. The viral isolates aligned are the ones published under the following accession numbers NC045512.2, LC521925.1, MN988668.1, MN985325.1, MN975262.1, MN938384.1, LR757998.1, LR757996.1, LR757995.1 and MN908947.3. The alignment of the S genes indicates 100% homology at the nucleotide level between the S gene of the different viral isolates. All viral isolates sequences are isolates with complete genome sequence entries from China, Japan and the US. Early indications from isolate sequence analysis seems to indicate little viral drift. However, if drift is ultimately observed, the same techniques can be used with the modified virus and its proteins and nucleic acid sequences.

[0137] The nucleotide sequence encoding the S protein of the SARS-CoV-2 comprises the nucleotide sequence set forth in SEQ ID NO: 9 or SEQ ID NO: 47. The SARS-CoV-2 is not well adapted for infection in mice. Therefore, genomic adaptative mutations are introduced to adapt the virus for infection in mice. In particular, a mutation in the nucleotide sequence is introduced, the mutation resulting in a S protein comprising a Y459H substitution. Table 4 shows genomic adaptative mutations in SARS-CoV virus, that can be adapted and introduced into other regions of the SARS-CoV-2 virus. See Roberts A et al. PLoS Pathog. 2007 January; 3(1): e5. doi: 10.1371.

[0138] The six mutations found in a SARS-CoV virus resulting from fifteen passages (and the resulting virus called MA15) and that are lethal for mice following intranasal inoculation are listed in Table 4. The labels in Table 4 are as follows: ORF^{a}: open reading frame; CDS^{b} coding sequence, sequence of nucleotides that corresponds with the sequence of amino acids in a protein (location includes start and stop codon); nsp^{c}; non-structural protein, cleavage product of ORF lab; Main^{pro}: main 3C-like protease; Hel: helicase; RBM^{d}: receptor binding motif (amino acids 424-494).

TABLE 4
Genomic adaptive mutations in SARS-CoV virus

| | | Mutations found in MA15 compared to SARS-CoV (Urbani) | |
|---|---|---|---|
| ORF^{a} | CDS^{b} | Nucleotide change | Amino acid change in SARS-CoV protein |
| 1a | 265-13413 | 10384 C−>T | H133Y nsp5 (Main^{pro})^{c} |
| | | 10793 A−>C | E269A nsp5 (Main^{pro})^{c} |
| | | 12814 A−>G | T67A nsp9c |
| 1b | 13398-21485 | 16177 C−>T | A4V nsp13 (Hel)^{c} |
| S | 21492-25259 | 22797 T−>C | Y436H Spike protein-RBM^{d} |
| M | 26398-27063 | 26428 G−>A | E11K M protein |

[0139] For efficient expression of transgenes from poxvirus vectors, heterologous gene coding sequences containing the vaccinia Early Transcription Terminator Signal (ETTS) should be removed, in one embodiment of this disclosure, through coding silent mutagenesis to generate full length transcripts during the early phase of the infection. These sequences have the following sequence: TTTTTNT (T5NT); SEQ ID NO: 14. Removing the ETTS in the S protein coding sequence can positively impact the generation of robust immune responses. See Earl P L et al. J Virol. 1990 May; 64(5):2448-51.

[0140] Examples of other mutations introduced in the S protein (SEQ ID NO: 47) in other embodiments of this disclosure are the following: D614G, S943P, K986P and V987P. One or more of these mutations can be introduced in the S protein in those embodiments.

[0141] Poxvirus replication occurs in the cytoplasm of the infected cell. The viruses do not enter the nucleus of the infected cell during the replication cycle, and therefore do not utilize the host cell transcriptional apparatus. Because of the cytoplasmic location of replication, poxviruses encode their own transcriptional machinery including the viral RNA polymerase and their own regulatory promoter recognition signals. Therefore, for efficient high-level expression from eukaryotic transgene expression has to be driven from poxvirus promoters. Poxvirus gene expression is controlled by early, intermediate and late promoters and can be defined as early (8 Hours before infection) and late (8 hours post-infection). DNA synthesis occurs 8 hours post infection and is referred to as the temporal boundary for the initiation of late gene expression. Highest levels of transgene antigenic load have usually been achieved through the use of a combination of Early and Late Promoter signals. The promoter used to control transcription of the S protein is an overlapping synthetic early/late promoter comprising the sequence (TTTTATTTTTTTTTTTTGGAATATAAATATCCGGTAAAATTGAAAAAATA SEQ ID NO: 8) including a 160 nucleotides long spacer 3′ of the early promoter and between the RNA start site and the ATG (SEQ ID NO: 42). See FIG. 9. See Di Pilato et al. Journal of General Virology (2015), 96, 2360-2371; incorporated herein by reference in its entirety. It seems that spacers with more than 50 nt would offer greater space to the transcription machinery, possibly accelerating gene expression, and spacers with more than 99 nt offer advantages to early gene expression.

[0142] The expression cassette generated comprises the engineered SARS-CoV-2 S protein adapted for mouse infection and where the ETTS sequences have been removed and controlled under the transcription of the overlapping tandem early/late promoter.

### Example 4. Generation of the Recombinant Poxvirus Comprising the Engineered SARS-CoV-2 S Protein

[0143] An exemplary method to generate a recombinant horsepox comprising the S protein of SARS-CoV-2 virus is shown in FIGS. 6 and 7 and comprises:
[0144] (a) Infection of cells (e.g., Vero cells or BSC-40 cells) with the rescue synthetic horsepox virus and the rescue synthetic VACV, as described above.
[0145] (b) The transfection of the infected cells (e.g., Vero cells or BSC-40 cells) with a PCR generated nucleotide fragment comprising the “engineered SARS-CoV-2 S gene expression cassette” is performed 24 hours post-infection. Recombination of the expression cassette occurs through the left and right flanking arms and the expression cassette is inserted into the TK gene locus. Accordingly, HPXV-095 TK locus is knocked-out and the expression cassette is inserted in the TK gene locus. After 30 min at 25° C., 7.2 ml of Eagle medium containing 8% fetal bovine serum was added and the monolayer was incubated for 3.5 hr at 37° C. The culture medium was then removed and replaced by 8 ml fresh Eagle medium containing 8% fetal bovine serum and the incubation was continued at 37° C. for two days. Cells were scraped from the bottles, pelleted by centrifugation (2,000×g, 5 min) and resuspended in 0.5 ml of Eagle medium containing 2.5% fetal bovine serum.
[0146] (c) The transfected cells are harvested 48 hours post-infection and the progeny virus of recombinant synthetic horsepoxvirus comprising the engineered SARS-CoV-2 S gene and the synthetic VACV is released of with repeated cycles of freeze/thaw.
[0147] (d) Selection of recombinant viruses. Thymidine kinase negative poxvirus recombinants are selected by plaque assay in TK⁻ cells (e.g., TK⁻ Vero cells or TK⁻ BSC-40 cells) with a 1% low melting agarose overlay containing 25 μg/ml BrdU. After three days at 37° C., cell monolayers are stained with 0.005% neutral red, plaques are picked using a sterile Pasteur pipette and placed in 0.5 ml of Eagle medium containing 2.5% fetal bovine serum. The recombinant viral progeny is identified by growth in TK⁻ cells. If the SARS-CoV-2 S gene has been inserted into the virus thymidine kinase (TK) gene, viruses containing inserted DNA will be TK⁻ and can be selected on this basis (Mackett et al., (1982)). Confirmation of the S gene is performed by PCR sequence analysis.

[0148] Once a recombinant poxvirus has been identified, a variety of methods can be used to assay the expression of the polypeptide encoded by the inserted gene. These methods include, but are not limited to, black plaque assay (an in situ enzyme immunoassay performed on viral plaques), Western blot analysis, radioimmunoprecipitation (RIPA), and enzyme immunoassay (EIA). Antibodies that recognize the SARS-CoV-2 S may be used.

[0149] The sequence of one embodiment of a synthetic horsepox virus comprising a nucleic acid encoding a SARS-CoV-2 virus S protein is SEQ ID NO: 43. The sequence of one embodiment of a synthetic vaccinia virus comprising a nucleic acid encoding a SARS-CoV-2 virus S protein is SEQ ID NO: 44.

### Example 5. Immunization of Mice with a Recombinant Poxvirus Comprising the Engineered SARS-CoV-2 S Protein

[0150] Primary chicken embryo fibroblasts (CEF) cells prepared from 10-day-old embryos are grown in minimum essential medium supplemented with 10% FBS and used to propagate and titer the recombinant poxvirus.

[0151] BALB/c mice are immunized by single-shot and prime-boost vaccination with 10⁵, 10⁶, 10⁷ or 10⁸ PFU of recombinant synthetic horsepox virus expressing SARS-CoV-2 protein via either scarification, intranasally, intramuscular or subcutaneous inoculations. Animals inoculated with non-recombinant virus (WT) or phosphate-buffered saline (Mock) are used as controls.

[0152] Four weeks after the immunization, animals are challenged intranasally with 10⁴ tissue culture 50% infective dose (TCID₅₀) of SARS-CoV-2 as described. (Subbarao, K et al. (2004) J. Virol. 78, 3572-3577). Two days later, the lungs and nasal turbinates of four animals in each group are removed and the SARS-CoV-2 titers are determined.

### Example 6. Immunization of Humans with a Recombinant Poxvirus Engineered SARS-CoV-2 S Protein

[0153] Subjects at risk for infection by SARS-CoV-2 S are vaccinated using a recombinant poxvirus engineered SARS-CoV-2 S protein of this disclosure through scarification with a bifurcated needle (standard dose, 2.5×10⁵ to 12.5×10⁵ plaque-forming units) typically into the upper arm. The recombinant poxvirus engineered SARS-CoV-2 S protein can also be administered as a single dose one-shot vaccine (e.g., 1×10⁶ PFU TNX-1800), in which vials containing 100 doses per vial are manufactured. The vaccination protects them from infection. However, subsequent vaccinations may be useful to boost immunity.

[0154] Methods regarding clinical trial testing of a vaccine have been previously described (Sadoff, J. et al. (2020) Safety and immunogenicity of the Ad26.COV2.S COVID-19 vaccine candidate: interim results of a phase 1/2a, double-blinded, randomized, placebo-controlled trial, MedRxiv, Pages 1-28; incorporated herein by reference in its entirety). A multi-center phase 1/2a randomized, double-blind, placebo-controlled clinical study designed to assess the safety, reactogenicity and immunogenicity of recombinant poxvirus engineered SARS-CoV-2 S protein is conducted. The engineered SARS-CoV-2 S protein is administered at a dose level, for example, between about 5×10¹⁰ to 1×10¹¹ viral particles (vp) per vaccination, either as a single dose or as a two-dose schedule spaced by, for example, 56 days in healthy adults (18-55 years old) and healthy elderly (≥65 years old). Vaccine elicited S specific antibody levels are measured, for example, by ELISA and neutralizing titers are measured, for example, in a microneutralization assay (see, e.g., methods in Example 11). CD4+T-helper (Th)1 and Th2, and CD8+ immune responses are assessed, for example, by intracellular cytokine staining (ICS).

### Example 7. Generation of Codon-Optimized SARS-CoV-2 Spike Protein (SARS-CoV-2-Spike-Co)

[0155] The SARS-CoV-2 Spike protein (SEQ ID NO: 45) was codon-optimized (SARS-CoV-2-Spike-co; SEQ ID NO: 50) for expression during poxvirus infection and was synthesized by GenScript. The synthesized DNA also contains a poxvirus synthetic early/late promoter at nucleotide position 10-48. The synthesized DNA was subcloned into a plasmid containing homology to either the HPXV095 gene locus (SEQ ID NO: 51) or the HPXV200 gene locus (SEQ ID NO: 52). Homologous recombination was used to insert the synthesized DNA by replacing the selectable markers that were previously inserted into the synthetic VACV (synVACV) or synthetic HPXV (scHPXV). The selectable markers were inserted as a fusion between yellow fluorescent protein (YFP) and guanine phosphoriosyltransferase (GPT) into either of the HPXV095 or A2K105 genes, respectively (see methods as disclosed in US 2018/0251736, incorporated herein by reference in its entirety).

### Example 8: Generation of Synthetic Vaccinia Virus TNX-2200

[0156] The YFP-GPT selectable marker in the synVACV (see Example 2) thymidine kinase (TK) locus (also referred to as the A2K105 gene locus) is replaced using, for example, homologous recombination with a codon-optimized SARS-CoV-2 Spike (SARS-CoV-2-co) nucleotide sequence to generate the synthetic vaccinia virus TNX-2200. One exemplary procedure is as follows.

[0157] Approximately 20 μgrams of plasmid containing the SARS-CoV-2-Spike-co nucleotide sequence flanked by approximately 400 nucleotides homologous to the A2K105 gene was linearized using the restriction enzyme SacI. Following restriction enzyme digestion, the linearized plasmid was further purified to remove residual enzyme. BSC-40 cells were infected with synVACV expressing YFP-GPT in the A2K105 gene locus (synVACVΔ A2K105^{yfp-gpt}) at a MOI of 0.1 for 1 hour. Following infection, the virus inoculum was replaced with OptiMEM media and was incubated for an additional 30 minutes at 37° C. Approximately 5 μgrams of purified linearized plasmid was mixed with Lipofectamine 2000 (ThermoFisher Scientific) at a ratio of 1 μgram of DNA to 3 μL of Lipofectamine 2000 in a total volume of 2 mL of OptiMEM. A DNA-lipid complex formed during approximately 10 minutes of incubation. It was then added to the virus-infected BSC-40 cells.

[0158] BSC-40 cells were incubated for 48 hours to allow for homologous recombination to occur. After 48 hours, the plates were scraped to lift virus-infected cells and the mixture was transferred to a conical tube. The cells were lysed following three rounds of freezing at −80° C. and thawing. An appropriate dilution, which can range from 1×10⁻² to 1×10⁻⁵, of the infection/transfection mixture was plated onto BSC-40 cells followed by an agar overlay. Infected cell plates were incubated until non-fluorescent “recombinant” plaques were visualized. These non-fluorescent plaques were marked, and agar plugs were picked and added into a 10 mM Tris pH 8.0 solution. The plaques were subsequently used to infect BSC-40 cells in a second round of infection. This plaque picking process and infection of BSC-40 cells was repeated until YFP was undetectable in the infected cells (ranges between 4-6 rounds of purification). PCR analysis using primers (sA2K J2R Flank Forward Primer 5′ to 3′: ATGCGATTCAAAAAAGAATCAGC (SEQ ID NO: 56) and sA2K J2R Flank Reverse Primer 5′ to 3′: CAATTTCCTCAAAATACATAAACGG (SEQ ID NO: 57)) that amplify the A2K105 gene locus was performed to confirm that the SARS-CoV-2 Spike gene was inserted into the A2K105 locus.

[0159] Western blot analysis was performed to test for SARS-Spike-co protein expression in the BSC-40 cells infected with synVACVΔA2K105^{yfp-gpt} or synVACVΔA2K105^{SARSCoV2-SPIKE-co:nm} (TNX-2200) clones 1.1.1.1.1 or 2.1.1.1.1 (FIG. 11). BSC-40 cells were infected with MOI 1.0 with the indicated viruses or with an inoculum without virus (mock), and protein lysates were harvested using RIPA lysis buffer at the indicated time points. SDS-PAGE was used to separate protein lysates and then the protein was transferred onto a nitrocellulose membrane. The membrane was subsequently blotted using anti-SARS-CoV2 Spike (ProSci) or anti-VACV 13 antibodies. Primary antibody binding was detected by blotting the membrane with IRDye secondary antibodies detectable at 800 nm or 680 nm channels (LI-COR). The SARS CoV2 Spike antibody detected different forms of the SARS-CoV-2 Spike protein including the full-length, glycosylated full-length, cleaved, and multimeric forms.

[0160] Viral genomic DNA from synVACVΔA2K105^{SARSCoV2-SPIKE-co::nm} (TNX-2200) clones 1.1.1.1.1 and 2.1.1.1.1 was isolated and the DNA was sequenced using Next Generation Sequencing (NGS) with the Illumina MiSeq platform. The sequencing data were analyzed by de novo assembly and mapped to reference software using the CLC Genomics Workbench software (Qiagen).

### Example 9. Generation of Synthetic Horsepox Virus TNX-1800a

[0161] The YFP-GPT selectable marker in the scHPXV (see Example 7) thymidine kinase (TK) locus (also referred to as the HPXV095 gene locus) was replaced using, for example, homologous recombination with a codon-optimized SARS-CoV-2 Spike (SARS-CoV-2-co) nucleotide sequence to generate the synthetic vaccinia virus TNX-1800a. One exemplary procedure is as follows.

[0162] Approximately 20 μgrams of plasmid containing the SARS-CoV-2-Spike-co nucleotide sequence flanked by approximately 400 nucleotides homologous to the HPXV095 gene was linearized using the restriction enzyme, SacI. Following restriction enzyme digestion, the linearized plasmid was further purified to remove residual enzyme. BSC-40 cells were infected with scHPXV expressing YFP-GPT in the HPXV095 gene locus at a MOI of 0.1 for 1 hour. Following infection, the virus inoculum was replaced with OptiMEM media and was incubated for an additional 30 minutes at 37° C. Approximately 5 μgrams of purified linearized plasmid was mixed with Lipofectamine 2000 (ThermoFisher Scientific) at a ratio of 1 μgram of DNA to 3 of Lipofectamine 2000 in a total volume of 2 mL of OptiMEM. A DNA-lipid complex formed during approximately 10 minutes of incubation. It was then added to the virus-infected BSC-40 cells.

[0163] BSC-40 cells were incubated for 48 hours to 72 hours to allow for homologous recombination to occur. Subsequently, the plates were scraped to lift virus-infected cells and the mixture was transferred to a conical tube. The cells were lysed following 3 rounds of freezing at −80° C. and thawing. An appropriate dilution, which can range from 1×10⁻² to 1×10⁻⁵, of the infection/transfection mixture was plated onto BSC-40 cells followed by an agar overlay. Infected cell plates were incubated until non-fluorescent “recombinant” plaques were visualized. These non-fluorescent plaques were marked, and agar plugs were picked and added into a 10 mM Tris pH 8.0 solution. The plaques were subsequently used to infect BSC-40 cells in a second round of infection. This plaque picking process and infection of BSC-40 cells was repeated until YFP was undetectable in the infected cells (ranges between 4-6 rounds of plaque purification). One non-fluorescent plaque was isolated from the low efficiency of homologous recombination in the HPXV-infected cells.

[0164] PCR analysis using primers (sA2K/HPXV J2R Flank Forward Primer 5′-3′: TATCGCATTTTCTAACGTGATGG (SEQ ID NO: 58) and sA2K/HPXV J2R Flank Reverse Primer 5′-3′: CCTCATTTGCACTTTCTGGTTC (SEQ ID NO: 59)) that amplify the HPXV095 gene locus was performed to confirm that the SARS-Spike-co gene was inserted into the HPXV095 locus. The viral genomic DNA was subsequently isolated from a preparation of sucrose-purified virus particles and used in Next Generation Sequencing with the Illumina MiSeq platform. The sequence data was analyzed by de novo assembly and mapped to reference software using the CLC Genomics Workbench software (Qiagen).

### Example 10. Generation of Synthetic Horsepox Virus TNX-1800b

[0165] The YFP-GPT selectable marker in the scHPXV (see Example 7) HPXV200 gene locus (also referred to as the Variola virus B22R homolog locus) was replaced using, for example, homologous recombination with a codon-optimized SARS-CoV-2 Spike (SARS-CoV-2-co) nucleotide sequence to generate the synthetic vaccinia virus TNX-1800b. One exemplary procedure is as follows.

[0166] Approximately 20 μgrams of plasmid containing SARS-CoV-2-Spike-co flanked by approximately 400 nucleotides homologous to the HPXV200 gene was linearized using the restriction enzyme, SacI. Following restriction enzyme digestion, the linearized plasmid was further purified to remove residual enzyme. BSC-40 cells were infected with scHPXV expressing YFP-GPT in the HPXV200 gene locus at a MOI of 0.1 for 1 hour. Following infection, the virus inoculum was replaced with OptiMEM media and incubated for an additional 30 minutes at 37° C. Approximately 5 μgrams of purified linearized plasmid was mixed with Lipofectamine 2000 (ThermoFisher Scientific) at a ratio of 1 μgram of DNA to 3 μL of Lipofectamine 2000 in a total volume of 2 mL of OptiMEM. A DNA-lipid complex formed during approximately 10 minutes of incubation. It was then added to the virus-infected BSC-40 cells.

[0167] BSC-40 cells were incubated for 48 hours to 72 hours to allow for homologous recombination to occur. Subsequently, the plates were scraped to lift virus-infected cells and the mixture was transferred to a conical tube. The cells were lysed following three rounds of freezing at −80° C. and thawing. An appropriate dilution, which can range from 1×10⁻² to 1×10⁻⁵, of the infection/transfection mixture was plated onto BSC-40 cells followed by an agar overlay. Infected cell plates were incubated until non-fluorescent “recombinant” plaques were visualized. These non-fluorescent plaques were marked, and agar plugs were picked and added into a 10 mM Tris pH 8.0 solution. These plaques were subsequently used to infect BSC-40 cells in a second round of infection. One non-fluorescent plaque was isolated due to low efficiency of homologous recombination in HPXV-infected cells compared to VACV-infected cells. The plaque picking process was repeated by infecting BSC-40 cells until YFP was undetectable (about 4-6 rounds of plaque purification).

[0168] PCR analysis using primers (sHPXV 200 Flank Forward Primer 5′-3′: ATAGCCACAATTATTGACGGGC (SEQ ID NO: 60) and sHPXV 200 Flank Reverse Primer 5′-3′: ggatgatatggtaatgtaactaccgatac (SEQ ID NO: 61)) that amplify the HPXV200 gene locus was performed to confirm that the SARS-Spike-co gene was inserted into the HPXV200 locus. The viral genomic DNA was subsequently isolated from a preparation of sucrose-purified virus particles and used for Next Generation Sequencing with the Illumina MiSeq platform. The sequence was analyzed by de novo assembly and mapped to reference software using the CLC Genomics Workbench software (Qiagen).

### Example 11. SARS-CoV-2 Spike Protein Analysis in TNX-1800a and TNX-1800b

[0169] Western blot analysis was performed to assess SARS-Spike-co protein expression in the BSC-40 cells infected with TNX-801, TNX-1800a (clone TNX-1800a-1) and TNX-1800b (clone TNX-1800b-2) (FIG. 12). BSC-40 cells were infected with MOI 1.0 with the indicated viruses and protein lysates were harvested using RIPA buffer at the indicated time points. SDS-PAGE was used to separate protein lysates and then the protein was transferred onto a nitrocellulose membrane. The membrane was subsequently blotted using anti-SARS-CoV2 Spike (ProSci), anti-VACV 13 or anti-Tubulin antibodies. Fluorescently tagged secondary antibodies were used to detect the binding of primary antibodies. The SARS CoV2 Spike antibody detected different forms of the SARS-CoV-2 Spike protein including the full-length, glycosylated full-length, cleaved, and multimeric forms.

### Example 12. Immunization of African Green Monkeys with a Recombinant Poxvirus Engineered SARS-CoV-2 S Protein

[0170] Methods of immunization and testing candidate vaccines in African Green Monkeys has been previously described (Hartman, A. et al. (2020) SARS-CoV-2 infection of African green monkeys result in mild respiratory disease discernible by PET/CT imaging and shedding of infectious virus from both respiratory and gastrointestinal tracts. PLOS Pathogens 16(9): e1008903; incorporated herein by reference in its entirety). African Green Monkeys (AGMs) were randomly separated into 6 groups (n=4) and vaccinated with different strains of a synthetic horsepox virus (HPXV). See Table 5 for strain and dose. At day 0, AGMs were vaccinated percutaneously via scarification using a bifurcated needle.

TABLE 5
Doses of HPXV strains Used to Vaccinate African Green Monkeys

| | Number of | Animal | | |
|---|---|---|---|---|
| Group | Animals | Number | HPXV strain | Dose (PFU) |
| 1 | 4 | 1F 16986 | TNX-801 | 2.9 × 10⁶ |
| | | 1F 16994 | | |
| | | 1M 16975 | | |
| | | 1M 16977 | | |
| 2 | 4 | 2F 16985 | TNX-801 | 1.06 × 10⁶ |
| | | 2F 16991 | | |
| | | 2M 16980 | | |
| | | 2M 16983 | | |
| 3 | 4 | 3F 16988 | TNX- | 2.9 × 10⁶ |
| | | 3F 16995 | 1800b-2 | |
| | | 3M 16976 | | |
| | | 3M 16982 | | |
| 4 | 4 | 4F 16989 | TNX- | 1.06 × 10⁶ |
| | | 4F 16990 | 1800b-2 | |
| | | 4M 16972 | | |
| | | 4M 16973 | | |
| 5 | 4 | 5F 16992 | TNX- | 0.6 × 10⁶ |
| | | 5F 16993 | 1800a-1 | |
| | | 5M 16979 | | |
| | | 5M 16981 | | |
| 6 | 4 | 6M 16978 | Vehicle | Not |
| | | 6M 16974 | Control | applicable |
| | | 6F16987 | | |
| | | 6F16984 | | |

[0171] The inoculation site of the AGMs was monitored and after 7 days presented with a cutaneous reaction, also known as a “take”, when vaccinated with TNX-801, TNX-1800b-2 or TNX-1800a-1 regardless of the dose eliciting an immune response, including a T cell immune response (FIGS. 13-17). A “take” has been previously described as a biomarker of a positive vaccine response indicating protective immunity (e.g., T cell immunity) against a vaccinia virus, such as smallpox (Jenner, E., 1800, 2^{nd} Ed. “An Inquiry into the Causes and Effects of the Variolae Vaccinae, a Disease Discovered in Some of the Western Counties of England, Particularly Gloucestershire, and Known by the Name of The Cow Pox”). The “take” is a measure of functional T cell immunity validated by the eradication of smallpox, a respiratory-transmitted disease caused by variola, in the 1960's. The presence of a “take” sited on AGMs after vaccination with TNX-1800b-2 or TNX-1800a-1 is predictive that a T cell immune response will be activated due to the introduction of the SARS-CoV-S protein, a COVID-19 antigen. The T cell immune response is activated when naïve T cells are presented with antigens (e.g., SARS-CoV-2 S protein), leading to naïve T cell differentiation and proliferation. This response also leads to immunological memory by generating memory T cells which provide protection and an accelerated immune response from subsequent challenge by the same antigen. On day 60, the vaccinated AGMs are challenged with SARS-CoV-2 via the intratracheal route and the challenges show that the vaccination provides a protective immunity against the virus. The surviving animals are euthanized on Day 88.

[0172] A Microneutralization Assay was performed 14 days after the AGMs were vaccinated with the indicated HPXV strains to assess the anti-SARS-CoV-2 neutralizing titers in the serum. The assay was initially performed in duplicate and a third replicate was performed if the first two replicates were not within a 2-fold dilution of each other. Serum samples were initially heat inactivated at 56° C. for 30-60 minutes after being aliquoted onto a master plate. The master plates can be stored at 4-8° C. for seven days or at −20° C. for three months.

[0173] Vero E6 cells (ATCC) at a concentration 2×10⁴ cells per well were seeded into 96-well plates 18-24 hours before addition of the serum test samples. On the day of the assay, master plates were thawed and nine serum test samples were 2-fold serial diluted from 1:5 to 1:640 on a separate 96-well plate/dilution block (columns 1-9). Additionally, each 96-well plate/dilution block contained a positive control serum (column 10), virus controls (column 11) and cell controls (column 12). After dilution, an equal volume of virus stock (1,000 TCID50/mL) is added to columns 1-11. In addition, assay quality control (QC) plates were set up at the same time consisting of positive control serum (columns 1-2), a negative control (columns 3-4), viral input back titer (columns 5-6), virus control (VC; columns 7-9) and cell controls (CC; columns 10-12). At least two QC plate were used per assay. Test and QC plates were incubated at 37° C. for 2-2.5 hours in a 5% CO₂ incubator. After incubation, aliquots of mixtures (sera and virus) for both test and QC plates (including controls) were transferred onto the 96-well plates pre-seeded with Vero E6 cell and incubated for 72±4 hours. Following incubation, plates were removed from the incubator and allowed to rest at room temperature for 20-40 minutes. 100 uL of Cell Titer-Glo (Promega) was added to all wells in the plates, gently mixed and incubated at room temperature for 10-30 minutes. Luminescence was read using an appropriate photometer. Plate cut-off values were calculated using the following formula:

(Average of VC wells+Average of CC wells)/2

Samples with luminescence above or below the plate cut-off are positive and negative for neutralizing antibody, respectively. The individual replicate is assigned a titer that is the reciprocal of the dilution of the last positive dilution (i.e., 1:80=is reported as a titer of 80). Titers are reported as median and geometric mean titers of the accepted replicate titers.

[0174] Table 6 shows the level of anti-SARS-CoV-2 neutralizing titers measured in vaccinated AGMs after 14 days of a single vaccination. The AGMs vaccinated with TNX-1800b-2 and TNX1800a-1 generated neutralizing titers (≥1:40 titer) of antibodies against SARS-CoV-2. The TNX-801 (an scHPXV not carrying the S protein expression cassette) vaccinated control animals and the placebo group did not generate anti-SARS-CoV-2 neutralizing titers (≤1:10 titer). Both the 2.9×10⁶ PFU and 1.06×10⁶ PFU doses of TNX-801 and TNX-1800 were well-tolerated.

TABLE 6,
Anti-SARS-CoV-2 neutralizing titers in vaccinated African Green Monkeys

| | | | | | | Geometric |
|---|---|---|---|---|---|---|
| Animal | HPXV | | | | | Mean Titer |
| Number | strain | Dose | Titer 1 | Titer 2 | Median | (GMT) |
| 3M 16982 | TNX- | 2.9 × 10⁶ | 640 | 20 | NQ | NQ |
| D15 | 1800b-2 | | | | | |
| 3M 16976 | TNX- | 2.9 × 10⁶ | 640 | 320 | 480 | 452.55 |
| D15 | 1800b-2 | | | | | |
| 3F 16988 | TNX- | 2.9 × 10⁶ | 320 | 160 | 240 | 226.27 |
| D15 | 1800b-2 | | | | | |
| 3F 16995 | TNX- | 2.9 × 10⁶ | 640 | 640 | 640 | 640.00 |
| D15 | 1800b-2 | | | | | |
| 4M 16973 | TNX- | 1.06 × 10⁶ | 160 | 160 | 160 | 160.00 |
| D14 | 1800b-2 | | | | | |
| 4M 16972 | TNX- | 1.06 × 10⁶ | 640 | 640 | 640 | 640.00 |
| D14 | 1800b-2 | | | | | |
| 4F 16989 | TNX- | 1.06 × 10⁶ | 80 | 80 | 80 | 80.00 |
| D14 | 1800b-2 | | | | | |
| 4F 16990 | TNX- | 1.06 × 10⁶ | 320 | 320 | 320 | 320.00 |
| D14 | 1800b-2 | | | | | |
| 5M 16979 | TNX- | 0.6 × 10⁶ | 320 | 320 | 320 | 320.00 |
| D14 | 1800a-1 | | | | | |
| 5M 16981 | TNX- | 0.6 × 10⁶ | 640 | 320 | 480 | 452.55 |
| D14 | 1800a-1 | | | | | |
| 5F 16993 | TNX- | 0.6 × 10⁶ | 320 | 320 | 320 | 320.00 |
| D14 | 1800a-1 | | | | | |
| 5F 16992 | TNX- | 0.6 × 10⁶ | 320 | 640 | 480 | 452.55 |
| D14 | 1800a-1 | | | | | |

### Example 13. Viral Growth Curves Measured in Cells Infected with Recombinant Poxvirus Engineered SARS-CoV-2 S Protein

[0175] BSC-40, HeLa and HEK 293 cells were seeded into a 6-well plate and subsequently infected with TNX-801, TNX-1800, TNX-1200, or TNX-2200 at a MOI of 0.01. After 48 hours of infection, cells were fixed and stained with 5% formaldehyde containing crystal violet. BSC-40 cells infected with TNX-801 and TNX-1800 had a significant cytopathic effect, while HeLa and HEK 293 cells showed minor and no cytopathic effect, respectively (FIG. 18). BSC-40 HeLa and HEK293 cells infected with TNX-1200 and TNX-2200 had a significant cytopathic effect in all infected cell lines (FIG. 18). Viral titer (PFU/mL) in BSC-40, HeLa and HEK 293 cells was measured over time after 24, 48 and 72 hours of infection with TNX-801, TNX-1800, TNX-1200, or TNX-2200 (FIGS. 19A-D), which corresponds to the cytopathic effect of the viruses as represented in FIG. 18.

[0176] BSC-40 cells were infected with HPXV clones (e.g., _TNX-801, scHPXVΔ095^{yfp-gpt}, TNX-1800a-1, scHPXVΔ200^{yfp-gpt}, or TNX-1800b-2; (FIGS. 20A-B)) or VACV clones (e.g., TNX-1200, TNX-2200 or synVACVΔA2K105^{yfp-gpt}; (FIGS. 21A-B)) at a MOI of 0.01. Viral titer (PFU/mL) was measured at 0, 3, 6, 12, 24, 48 and 72 hours to determine viral growth in infected cells. The presence of SARS-CoV-2 Spike protein slows HPXV clone viral growth by approximately 0.5 log, while it slows VACV clone viral growth by approximately 1 log.

[0177] The cytopathic effect seen in Vero cells and BSC-40 cells infected with the various HPXV and VACV clones shows that these cell lines can be used to manufacture the viruses (e.g., TNX-1800 and TNX-801).

### Example 14. Generation of a SARS-CoV-2 Spike Synthetic DNA Expression Cassette and Recombinant scHPXV Transfected with the Cassette

[0178] As illustrated in FIG. 22, SARS-CoV-2 Spike (S) nucleotide sequence (SEQ ID NO: 45) is modified by removing the Early Transcription Terminator Signal (T₅NT) (SEQ ID NO: 14) using silent coding mutagenesis thereby retaining the SARS-CoV-2 Spike (S) protein coding sequences.

[0179] The location of an insertion site for the heterologous transgene SARS-CoV-2 Spike (S) within the DNA nucleotide sequence of a synthetic chimeric (sc) Horsepox genome is selected (for example the TK gene locus HPXV095; positions 992077-92610; SEQ ID NO:1). The DNA nucleotide sequences proximal to the left and right of the selected HPXV insertion site, which define the Left and Right Flanking arms, are identified (see FIG. 22). Those arms are used to drive homologous nucleotide site specific recombination between the rescue virus and heterologous transgene. A DNA nucleotide sequence encoding a poxvirus-based promoter for driving high levels of SARS-CoV-2 Spike (S) gene expression, such as the vaccinia virus Early/Late Promotor, is also selected.

[0180] One exemplary DNA nucleotide sequence of approximately 6 kb for a SARS-CoV-2 Spike (S) synthetic expression cassette, comprising the DNA nucleotide sequences of a Left Flanking Arm, a vaccinia virus Early/Late Promotor operably linked to the modified CoVID-SARS-2 Spike (S) nucleic acid sequence, and a Right Flanking Arm is then synthesized (e.g., by a commercial vendor (e.g., Genewiz)). See FIG. 22.

[0181] The SARS-CoV-2 Spike (S) Synthetic expression cassette DNA is then transfected into cells (e.g., BSC-40 cells) infected with an scHPXV. Recombinant horsepox viral progeny containing the SARS-CoV-2 Spike (S) synthetic expression cassette are selected using media containing BrdU so as to prevent viral amplification of the parental virus retaining the original insertion site viral genomic DNA sequences. The recombinant virus is purified using successive rounds of plaque purification. The nucleotide sequence from the purified virus across the entire SARS-CoV-2 Spike (S) heterologous transgene cassette is confirmed by sequence analysis (e.g., PCR sequence analysis). See SEQ ID NO: 63.

[0182] Similar constructs and steps can be carried out using a horsepox virus to generate a recombinant scHPXV containing a mouse adapted spike protein expression cassette (see SEQ ID NO: 64) and a vaccinia virus, using, for example, the vaccinia TK gene locus synVACV105; positions 83823-84344 (see SEQ ID NO: 2) to generate a recombinant vaccinia virus containing a mouse adapted spike protein expression cassette (see SEQ ID NO: 65).

### Example 15. Efficacy of Recombinant Poxvirus Carrying an Expression Cassette Encoding a SARS-CoV-2 S Protein in Immunized African Green Monkeys Challenged with SARS-CoV-2

[0183] At day 0, African Green Monkeys (AGMs) were vaccinated percutaneously via scarification using a bifurcated needle as described in Example 12. Table 7 shows the level of anti-SARS-CoV-2 neutralizing titers measured in vaccinated AGMs after 0, 7, 15, 21, 29, 41 and 47 days of a single vaccination. The AGMs vaccinated with TNX-1800b-2 and TNX1800a-1 generated neutralizing titers (≥1:40 titer) of antibodies against SARS-CoV-2. The TNX-801 (an scHPXV not carrying the S protein expression cassette) vaccinated control animals and the placebo group did not generate anti-SARS-CoV-2 neutralizing titers (≤1:10 titer). Both the 2.9×10⁶ PFU and 1.06×10⁶ PFU doses of TNX-801 and TNX-1800 were well-tolerated.

TABLE 7
Anti-SARS-CoV-2 neutralizing titers in vaccinated African Green Monkeys

| | | | Titer | Titer | Titer | Titer | | | |
|---|---|---|---|---|---|---|---|---|---|
| HPXV | Dose | Animal | Day | Day | Day | Day | Titer | Titer | Titer |
| strain | (PFU) | Number | 0 | 7 | 15 | 21 | Day 29 | Day 41 | Day 47 |
| TNX-801 | 2.9 × 10⁶ | IM 16977 | NQ | 5.00 | 7.07 | 5.00 | 5.00 | 5.00 | 5.00 |
| | | IM 16975 | 7.07 | 7.07 | 2.50 | 5.00 | 5.00 | 5.00 | 5.00 |
| | | IF 16994 | 5.00 | 5.00 | 2.50 | 5.00 | 5.00 | 5.00 | 5.00 |
| | | IF 16986 | 5.00 | 7.07 | 7.07 | 5.00 | 5.00 | 5.00 | 5.00 |
| TNX-801 | 1.06 × 10⁶ | 2M 16980 | 5.00 | 5.00 | 2.50 | 5.00 | 5.00 | 5.00 | 5.00 |
| | | 2M 16983 | 5.00 | 5.00 | 2.50 | 5.00 | 5.00 | 5.00 | 5.00 |
| | | 2F 16985 | 5.00 | 5.00 | 3.54 | 5.00 | 5.00 | 5.00 | 5.00 |
| | | 2F 16991 | 5.00 | 5.00 | 2.50 | 5.00 | 5.00 | 5.00 | 5.00 |
| TNX- | 2.9 × 10⁶ | 3M 16982 | 5.00 | 5.00 | 113.14 | 113.14 | 40.00 | 56.57 | 1280.00 |
| 1800b-2 | | 3M 16976 | 7.07 | 5.00 | 80.00 | 113.14 | 40.00 | 80.00 | 640.00 |
| | | 3F 16988 | 5.00 | 5.00 | 113.14 | 160.00 | 80.00 | 160.00 | 320.00 |
| | | 3F 16995 | 5.00 | 5.00 | 320.00 | 226.27 | 40.00 | 56.57 | 1280.00 |
| TNX- | 1.06 × 10⁶ | 4M 16973 | 5.00 | 5.00 | 113.14 | 226.27 | 113.14 | 80.00 | 905.10 |
| 1800b-2 | | 4M 16972 | 5.00 | 5.00 | 452.55 | 452.55 | 320.00 | 320.00 | NQ |
| | | 4F 16989 | 5.00 | 5.00 | 56.57 | 28.28 | 14.14 | 40.00 | 1280.00 |
| | | 4F 16990 | 5.00 | 5.00 | 320.00 | 226.27 | 80.00 | 160.00 | 905.10 |
| TNX- | 0.6 × 10⁶ | 5M 16979 | 5.00 | 5.00 | 160.00 | 113.14 | 113.14 | NQ | 226.27 |
| 1800a-1 | | 5M 16981 | 5.00 | 5.00 | 226.27 | 160.00 | 80.00 | 80.00 | 452.55 |
| | | 5F 16993 | 7.07 | 5.00 | 113.14 | NQ | 56.57 | 56.57 | 160.00 |
| | | 5F 16992 | 7.07 | 5.00 | 226.27 | 640.00 | NQ | 226.27 | 452.55 |
| Vehicle | Not | 6M 16978 | 5.00 | 5.00 | 2.50 | 5.00 | 5.00 | 5.00 | 5.00 |
| Control | applicable | 6M 16974 | 5.00 | 5.00 | 3.54 | 5.00 | 5.00 | 5.00 | 5.00 |
| | | 6F16987 | 7.07 | 5.00 | 3.54 | 5.00 | 5.00 | 5.00 | 5.00 |
| | | 6F16984 | 7.07 | 5.00 | 3.54 | 5.00 | 5.00 | 5.00 | 5.00 |

[0184] At day 41, the vaccinated AGMs were anesthetized and challenged (also referred to as inoculated) with approximately 2×10⁶ TCID₅₀/animal wild-type SARS-CoV-2 via the 1. intranasal and 2. intratracheal route. The volume of virus was split evenly between each of the two routes (1 mL per route with a 1×106 TCID₅₀/mL virus stock). For the intranasal route, AGMs were anesthetized and inoculated by slowly pipetting 500 μL into each are followed by inhalation. For the intratracheal route, AGMs were anesthetized, and a tube was inserted into the trachea. After the end of the tube was situated approximately at the mid-point of the trachea, a syringe containing the inoculate with the virus was attached to the tube and the inoculate was slowly instilled into the trachea followed by an equal volume of PBS to flush the tube. After the AGMs were inoculated, the animal was returned to its home cage and monitored for recovery from the anesthesia.

[0185] An oropharyngeal swab specimen and a tracheal lavage specimen were collected on Day 41 and Day 47 from the inoculated AGMs. The specimens were processed by RT-qPCR methods to measure SARS-CoV-2 copy number. Table 8 shows the SARS-CoV-2 copy number from oropharyngeal swab specimens. Table 9 shows the SARS-CoV-2 copy number from tracheal lavage specimens. At Day 47, AGMs vaccinated with TNX-1800b-2 and TNX-1800a-1 developed protective immunity against SARS-CoV-2.

TABLE 8
RT-qPCR of SARS-CoV-2 Copy Number
per Swab from Oropharyngeal Swab

| | | | Day 41 | Day 47 |
|---|---|---|---|---|
| HPXV | Dose | Animal | (Copy number | (Copy number |
| strain | (PFU) | Number | per swab) | per swab) |
| TNX-801 | 2.9 × 10⁶ | 1M 16977 | 0.00E+00 | 2.59E+06 |
| | | 1M 16975 | 0.00E+00 | 1.75E+05 |
| | | 1F 16994 | 0.00E+00 | 2.61E+03 |
| | | 1F 16986 | 0.00E+00 | 2.22E+04 |
| TNX-801 | 1.06 × 10⁶ | 2M 16980 | 0.00E+00 | 6.69E+03 |
| | | 2M 16983 | 0.00E+00 | 6.33E+04 |
| | | 2F 16985 | 0.00E+00 | 5.56E+04 |
| | | 2F 16991 | 2.47E+02 | 3.75E+03 |
| TNX- | 2.9 × 10⁶ | 3M 16982 | 0.00E+00 | 0.00E+00 |
| 1800b-2 | | 3M 16976 | 1.98E+02 | 0.00E+00 |
| | | 3F 16988 | 4.29E+02 | 0.00E+00 |
| | | 3F 16995 | 0.00E+00 | 0.00E+00 |
| TNX- | 1.06 × 10⁶ | 4M 16973 | 7.59E+03 | 0.00E+00 |
| 1800b-2 | | 4M 16972 | 0.00E+00 | 0.00E+00 |
| | | 4F 16989 | 0.00E+00 | 0.00E+00 |
| | | 4F 16990 | 0.00E+00 | 0.00E+00 |
| TNX- | 0.6 × 10⁶ | 5M 16979 | 0.00E+00 | 0.00E+00 |
| 1800a-1 | | 5M 16981 | 0.00E+00 | 0.00E+00 |
| | | 5F 16993 | 0.00E+00 | 4.68E+02 |
| | | 5F 16992 | 0.00E+00 | 0.00E+00 |
| Vehicle | Not | 6M 16978 | 0.00E+00 | 9.26E+03 |
| Control | applicable | 6M 16974 | 0.00E+00 | 3.66E+04 |
| | | 6F16987 | 0.00E+00 | 0.00E+00 |
| | | 6F16984 | 0.00E+00 | 1.53E+06 |

TABLE 9
RT-qPCR of SARS-CoV-2 Copy Number
per ml. from Tracheal Lavage

| | | | Day 41 | Day 47 |
|---|---|---|---|---|
| HPXV | Dose | Animal | (Copy number | (Copy number |
| strain | (PFU) | Number | per mL) | per mL) |
| TNX-801 | 2.9 × 10⁶ | IM 16977 | 0.00E+00 | 2.11E+06 |
| | | IM 16975 | 0.00E+00 | 0.00E+00 |
| | | IF 16994 | 0.00E+00 | 5.31E+02 |
| | | IF 16986 | 0.00E+00 | 3.61E+02 |
| TNX-801 | 1.06 × 10⁶ | 2M 16980 | 0.00E+00 | 4.50E+04 |
| | | 2M 16983 | 0.00E+00 | 0.00E+00 |
| | | 2F 16985 | 0.00E+00 | 3.95E+05 |
| | | 2F 16991 | 0.00E+00 | 1.72E+04 |
| TNX- | 2.9 × 10⁶ | 3M 16982 | 0.00E+00 | 0.00E+00 |
| 1800b-2 | | 3M 16976 | 0.00E+00 | 0.00E+00 |
| | | 3F 16988 | 0.00E+00 | 0.00E+00 |
| | | 3F 16995 | 0.00E+00 | 0.00E+00 |
| TNX- | 1.06 × 10⁶ | 4M 16973 | 0.00E+00 | 8.42E+02 |
| 1800b-2 | | 4M 16972 | 0.00E+00 | 0.00E+00 |
| | | 4F 16989 | 0.00E+00 | 0.00E+00 |
| | | 4F 16990 | 0.00E+00 | 0.00E+00 |
| TNX- | 0.6 × 10⁶ | 5M 16979 | 0.00E+00 | 0.00E+00 |
| 1800a-1 | | 5M 16981 | 0.00E+00 | 9.34E+03 |
| | | 5F 16993 | 0.00E+00 | 0.00E+00 |
| | | 5F 16992 | 0.00E+00 | 6.82E+02 |
| Vehicle | Not | 6M 16978 | 0.00E+00 | 1.91E+03 |
| Control | applicable | 6M 16974 | 0.00E+00 | 8.13E+03 |
| | | 6F16987 | 0.00E+00 | 1.43E+04 |
| | | 6F16984 | 0.00E+00 | 1.17E+03 |

### Exemplary Embodiments

[0186] 1. A recombinant poxvirus comprising a nucleic acid encoding a SARS-CoV-2 virus protein, wherein the SARS-CoV-2 protein is selected from the group consisting of the spike protein (S), the membrane protein (M) and the nucleocapsid protein (N), or combinations of two or more of said proteins.
[0187] 2. The recombinant poxvirus according to embodiment 1, wherein the poxvirus is an orthopoxvirus.
[0188] 3. The recombinant poxvirus according to embodiment 2, wherein the orthopoxvirus is selected from the group consisting of camelpox (CMLV) virus, cowpox virus (CPXV), ectromelia virus (ECTV), horsepox virus (HPXV), monkeypox virus (MPXV), vaccinia virus (VACV), variola virus (VARV), rabbitpox virus (RPXV), raccoon poxvirus, skunkpox virus, Taterapox virus, Uasin Gishu disease virus and volepox virus.
[0189] 4. The recombinant poxvirus according to embodiment 2, wherein the orthopoxvirus is a horsepox virus.
[0190] 5. The recombinant poxvirus according to embodiment 4, wherein the horsepox virus is strain MNR-76.
[0191] 6. The recombinant poxvirus according to embodiment 2, wherein the orthopoxvirus is a vaccinia virus.
[0192] 7. The recombinant poxvirus according to embodiment 6, wherein the vaccinia virus is selected from the group of strains consisting of: Western Reserve, Western Reserve Clone 3, Tian Tian, Tian Tian clone TP5, Tian Tian clone TP3, NYCBH, NYCBH clone Acambis 2000 (ACAM 2000), Wyeth, Copenhagen, Lister, Lister 107, Lister-LO, Lister GL-ONC1, Lister GL-ONC2, Lister GL-ONC3, Lister GL-ONC4, Lister CTC1, Lister IMG2 (Turbo FP635), IHD-W, LC16m18, Lederle, Tashkent clone TKT3, Tashkent clone TKT4, USSR, Evans, Praha, L-IVP, V-VET1 or LIVP 6.1.1, Ikeda, EM-63, Malbran, Duke, 3737, CV-1, Connaught Laboratories, Serro 2, CM-01, NYCBH Dryvax clone DPP13, NYCBH Dryvax clone DPP15, NYCBH Dryvax clone DPP20, NYCBH Dryvax clone DPP17, NYCBH Dryvax clone DPP21, VACV-IOC, Mulford 1902, Chorioallantoid Vaccinia virus Ankara (CVA), Modified vaccinia Ankara (MVA), and MVA-BN.
[0193] 8. The recombinant poxvirus according to any one of embodiments 1-7, wherein the SARS-CoV-2 protein is S protein.
[0194] 9. The recombinant poxvirus according to any one of embodiments 1-8, wherein the amino acid sequence of the SARS-CoV-2 virus protein is modified with reference to a wild type protein.
[0195] 10. The recombinant poxvirus according to embodiment 8, wherein the SARS-CoV-2 virus S protein is modified to infect mice.
[0196] 11. The recombinant poxvirus according to embodiment 8, wherein the amino acid sequence of the SARS-CoV-2 virus S protein comprises one or more substitutions selected from Y459H, D614G, S943P, K986P and V987P, with reference to a wild type S protein (SEQ ID NO: 47).
[0197] 12. The recombinant poxvirus according to any one of embodiments 1-11, wherein the nucleic acid encoding a SARS-CoV-2 virus protein is located in a region of the poxvirus that is not essential for replication of the poxvirus.
[0198] 13. The recombinant poxvirus according to embodiment 12, wherein the nucleic acid encoding a SARS-CoV-2 virus protein is located in the thymidine kinase (TK) gene locus of the poxvirus.
[0199] 14. The recombinant poxvirus according to embodiment 12, wherein the nucleic acid encoding a SARS-CoV-2 virus protein is located in the B22R homolog gene locus of the poxvirus.
[0200] 15. The recombinant poxvirus according to any one of embodiments 1-14, wherein the nucleic acid encoding a SARS-CoV-2 virus protein is operatively linked to a promoter.
[0201] 16. The recombinant poxvirus according to embodiment 15, wherein the promoter is a poxvirus-specific promoter.
[0202] 17. The recombinant poxvirus according to embodiment 16, wherein the poxvirus specific promoter is a vaccinia virus early promoter.
[0203] 18. The recombinant poxvirus according to embodiment 16, wherein the poxvirus specific promoter is a vaccinia virus late promoter.
[0204] 19. The recombinant poxvirus according to embodiment 16, wherein the poxvirus specific promoter is a tandem of a vaccinia virus early and late promoter.
[0205] 20. The recombinant poxvirus according to any one of embodiments 1-19, wherein the poxvirus is a synthetic poxvirus.
[0206] 21. The recombinant poxvirus according to embodiment 20, wherein the recombinant poxvirus is selected from the group consisting of TNX-2200 (synVACVΔA2K105^{SARS-CoV2-Spike-co}), TNX-2200 clone 1.1.1.1.1, TNX-2200 clone 2.1.1.1.1, TNX-1800 (scHPXVΔ200^{SARS-COV2-Spike-co}), TNX-1800a, TNX-1800a-1, TNX-1800b, and TNX-1800b-2.
[0207] 22. The recombinant poxvirus according to embodiment 21, wherein the recombinant poxvirus is TNX-1800b-2.
[0208] 23. The recombinant virus according to embodiment 21, wherein the recombinant poxvirus is TNX-1800a-1.
[0209] 24. The recombinant poxvirus according to embodiment 20, wherein the recombinant poxvirus comprises any one of SEQ ID NOs: 63, 64 or 65.
[0210] 25. A pharmaceutical composition comprising a recombinant poxvirus according to any one of embodiments 1-24 and a pharmaceutically acceptable carrier.
[0211] 26. The pharmaceutical composition according to embodiment 25, wherein the recombinant poxvirus is selected from the group consisting of TNX-2200 (synVACVΔA2K105^{SARS-CoV2-Spike-co}), TNX-2200 clone 1.1.1.1.1, TNX-2200 clone 2.1.1.1.1, TNX-1800 (scHPXVΔ200^{SARS-COV2-Spike-co}), TNX-1800a, TNX-1800a-1, TNX-1800b, and TNX-1800b-2.
[0212] 27. The pharmaceutical composition according to embodiment 25, wherein the recombinant poxvirus comprises any one of SEQ ID Nos: 63, 64 or 65.
[0213] 28. The pharmaceutical composition according to embodiment 26, wherein the recombinant poxvirus is TNX-1800b-2.
[0214] 29. The pharmaceutical composition according to embodiment 26, wherein the recombinant poxvirus is TNX-1800a-1.
[0215] 30. A cell infected with a recombinant poxvirus according to any one of embodiments 1-29.
[0216] 31. The cell according to embodiment 30, wherein the cell is a mammalian cell.
[0217] 32. The cell according to embodiment 31, wherein the mammalian cell is a Vero cell, a Vero E6 cell or a BSC-40 cell.
[0218] 33. The cell according to embodiment 31, wherein the mammalian cell is a Vero adherent cell, a Vero suspension cell, a BHK-21 cell, an ACE2 Knockout Vero cell, or an MRC-5 cell.
[0219] 34. The MRC-5 cell according to embodiment 33, grown in the presence of 5% fetal calf serum.
[0220] 35. The cell according to embodiment 30, wherein the cell is an avian cell.
[0221] 36. The cell according to embodiment 35, wherein the avian cell is a chicken embryo fibroblast, a duck embryo-derived cell, an EB66® cell, an AGE1.CRpIX® cell, or a DF-1 cell.
[0222] 37. The cell according to embodiment 30, wherein the cell is an adherent cell.
[0223] 38. The cell according to embodiment 30, wherein the cell is a suspension cell.
[0224] 39. A method for selecting a cell that expresses a SARS-CoV-2 virus protein, comprising infecting said cell with a recombinant poxvirus according to any one of embodiments 1-24 and selecting the infected cell expressing said SARS-CoV-2 virus protein.
[0225] 40. The method for selecting a cell that expresses a SARS-CoV-2 virus protein according to embodiment 39, wherein the recombinant poxvirus selected from the group consisting of TNX-2200 (synVACVΔA2K105^{SARS-CoV2-Spike-co}), TNX-2200 clone 1.1.1.1.1, TNX-2200 clone 2.1.1.1.1, TNX-1800 (scHPXVΔ200^{SARS-COV2-Spike-co}), TNX-1800a, TNX-1800a-1, TNX-1800b, and TNX-1800b-2.
[0226] 41. The method for selecting a cell that expresses a SARS-CoV-2 virus protein according to embodiment 39, wherein the recombinant poxvirus comprises any one of SEQ ID Nos: 63, 64 or 65.
[0227] 42. The method for selecting a cell that expresses a SARS-CoV-2 virus protein according to embodiment 40, wherein the recombinant poxvirus is TNX-1800b-2.
[0228] 43. The method for selecting a cell that expresses a SARS-CoV-2 virus protein according to embodiment 40, wherein the recombinant poxvirus is TNX-1800a-1.
[0229] 44. A method of inducing an immune response against a SARS-CoV-2 virus in a subject, comprising administering to said subject an immunologically effective amount of the recombinant poxvirus according to any one of embodiments 1-24 or the pharmaceutical composition according to any one of embodiments 25-29.
[0230] 45. The method of inducing an immune response against a SARS-CoV-2 virus in a subject according to embodiment 44, wherein said immunologically effective amount of the recombinant poxvirus is administered by scarification.
[0231] 46. The method of inducing an immune response against a SARS-CoV-2 virus in a subject according to embodiment 44, wherein said immune response comprises antibodies that are capable of neutralizing the SARS-CoV-2 virus.
[0232] 47. The method of inducing an immune response against a SARS-CoV-2 virus in a subject according to embodiment 44, wherein the immunologically effective amount of a recombinant poxvirus is capable of protecting the subject from SARS-CoV-2 virus.
[0233] 48. The method of inducing an immune response against a SARS-CoV-2 virus in a subject according to embodiment 44, wherein the immunologically effective amount of a recombinant poxvirus reduces or prevents the progression of the virus after SARS-CoV-2 infection in the subject.
[0234] 49. The method of inducing an immune response against a SARS-CoV-2 virus in a subject according to embodiment 44, wherein the immune response is a T-cell immune response.
[0235] 50. A method of inducing an immune response against a SARS-CoV-2 virus and a poxvirus comprising administering to said subject an immunologically effective amount of a recombinant poxvirus according to any one of embodiments 1-24 or the pharmaceutical composition according to any one of embodiments 25-29.
[0236] 51. The method of inducing an immune response against the SARS-CoV-2 virus and the poxvirus according to embodiment 50, wherein said immunologically effective amount of the recombinant poxvirus is administered by scarification.
[0237] 52. The method of inducing an immune response against the SARS-CoV-2 virus and the poxvirus according to embodiment 50, wherein said immune response comprises antibodies that are capable of neutralizing the SARS-CoV-2 virus and the poxvirus.
[0238] 53. The method of inducing an immune response against the SARS-CoV-2 virus and the poxvirus according to embodiment 50, wherein the immunologically effective amount of a recombinant poxvirus is capable of protecting the subject from the SARS-CoV-2 virus and the poxvirus.
[0239] 54. The method of inducing an immune response against the SARS-CoV-2 virus and the poxvirus according to embodiment 50, wherein the immunologically effective amount of a recombinant poxvirus reduces or prevents the progression of the SARS-CoV-2 virus infection and/or the poxvirus infection in the subject.
[0240] 55. The method of inducing an immune response against the SARS-CoV-2 virus and the poxvirus according to embodiment 50, wherein the immune response is a T-cell immune response.
[0241] 56. The method of inducing an immune response against the SARS-CoV-2 virus and the poxvirus according to any one of embodiments 50-55, wherein the poxvirus is vaccinia virus, variola, horsepox virus or monkeypox virus.
[0242] 57. A method of inducing T cell immunity against a SARS-CoV-2 virus comprising administering to said subject an immunologically effective amount of a recombinant poxvirus according to any one of embodiments 1-24 or the pharmaceutical composition according to any one of embodiments 25-29.
[0243] 58. The method of inducing T cell immunity against a SARS-CoV-2 virus according to embodiment 57, wherein said immunologically effective amount of the recombinant poxvirus is administered by scarification.
[0244] 59. The method of inducing T cell immunity against a SARS-CoV-2 virus according to embodiment 57, wherein the immunologically effective amount of a recombinant poxvirus is capable of protecting the subject from SARS-CoV-2 virus.
[0245] 60. The method of inducing T cell immunity against a SARS-CoV-2 virus according to embodiment 57, wherein the immunologically effective amount of a recombinant poxvirus reduces or prevents the progression of the SARS-CoV-2 infection in the subject.
[0246] 61. A method of inducing T cell immunity against a SARS-CoV-2 virus and a poxvirus comprising administering to said subject an immunologically effective amount of a recombinant poxvirus according to any one of embodiments 1-24 or the pharmaceutical composition according to any one of embodiments 25-29.
[0247] 62. The method of inducing T cell immunity against the SARS-CoV-2 virus and the poxvirus according to embodiment 61, wherein said immunologically effective amount of the recombinant poxvirus is administered by scarification.
[0248] 63. The method of inducing T cell immunity against the SARS-CoV-2 virus and the poxvirus according to embodiment 61, wherein the immunologically effective amount of a recombinant poxvirus is capable of protecting the subject from the SARS-CoV-2 virus and the poxvirus.
[0249] 64. The method of inducing T cell immunity against the SARS-CoV-2 virus and the poxvirus according to embodiment 61, wherein the immunologically effective amount of a recombinant poxvirus reduces or prevents the progression of the SARS-CoV-2 infection and/or poxvirus infection in the subject.
[0250] 65. The method of inducing T cell immunity against the SARS-CoV-2 virus and the poxvirus according to any one of embodiments 61-64, wherein the poxvirus is vaccinia virus, variola, horsepox virus or monkeypox virus.
[0251] 66. A method of generating a recombinant poxvirus according to any one of embodiments 1-65, the method comprising:
   [0252] (a) Infecting a host cell with a poxvirus;
   [0253] (b) Transfecting the infected cell of step (a) with a nucleic acid encoding a SARS-CoV-2 virus protein to generate a recombinant poxvirus; and
   [0254] (c) Selecting a recombinant poxvirus, wherein the nucleic acid encoding a SARS-CoV-2 virus protein is located, upon transfection, in a region of the poxvirus that is not essential for the replication of the poxvirus.
[0255] 67. The method according to any one of embodiments 39-66, wherein the SARS-CoV-2 protein is selected from the group consisting of the S spike protein, the M protein and the N protein, or combinations of two or more of said proteins.
[0256] 68. The method according to any one of embodiments 39-67, wherein the poxvirus is an orthopoxvirus.
[0257] 69. The method according to embodiment 68, wherein the orthopoxvirus is selected from the group consisting of camelpox (CMLV) virus, cowpox virus (CPXV), ectromelia virus (ECTV), horsepox virus (HPXV), monkeypox virus (MPXV), vaccinia virus (VACV), variola virus (VARV), rabbitpox virus (RPXV), raccoon poxvirus, skunkpox virus, Taterapox virus, Uasin Gishu disease virus and volepox virus.
[0258] 70. The method according to embodiment 68, wherein the orthopoxvirus is a horsepox virus.
[0259] 71. The method according to embodiment 70, wherein the horsepox virus is strain MNR-76.
[0260] 72. The method according to embodiment 68, wherein the orthopoxvirus is a vaccinia virus.
[0261] 73. The method according to embodiment 72, wherein the vaccinia virus is selected from the group of strains consisting of: Western Reserve, Western Reserve Clone 3, Tian Tian, Tian Tian clone TP5, Tian Tian clone TP3, NYCBH, NYCBH clone Acambis 2000, Wyeth, Copenhagen, Lister, Lister 107, Lister-LO, Lister GL-ONC1, Lister GL-ONC2, Lister GL-ONC3, Lister GL-ONC4, Lister CTC1, Lister IMG2 (Turbo FP635), IHD-W, LC16m18, Lederle, Tashkent clone TKT3, Tashkent clone TKT4, USSR, Evans, Praha, L-IVP, V-VET1 or LIVP 6.1.1, Ikeda, EM-63, Malbran, Duke, 3737, CV-1, Connaught Laboratories, Serro 2, CM-01, NYCBH Dryvax clone DPP13, NYCBH Dryvax clone DPP15, NYCBH Dryvax clone DPP20, NYCBH Dryvax clone DPP17, NYCBH Dryvax clone DPP21, VACV-IOC, Chorioallantoid Vaccinia virus Ankara (CVA), Modified vaccinia Ankara (MVA), and MVA-BN.
[0262] 74. The method according to any one of embodiments 39-73, wherein the nucleic acid encoding a SARS-CoV-2 virus protein is located in a region of the poxvirus that is not essential for replication of the poxvirus.
[0263] 75. The method according to embodiment 74, wherein the nucleic acid encoding a SARS-CoV-2 virus protein is located in the thymidine kinase (TK) gene locus of the poxvirus.
[0264] 76. The method according to embodiment 74, wherein the nucleic acid encoding a SARS-CoV-2 virus protein is located in the B22R homolog gene locus of the poxvirus.
[0265] 77. The method according to any one of embodiments 39-76, wherein the nucleic acid encoding a SARS-CoV-2 virus protein is operatively linked to a promoter.
[0266] 78. The method according to embodiment 77, wherein the promoter is a poxvirus specific promoter.
[0267] 79. The method according to embodiment 78, wherein the poxvirus specific promoter is a vaccinia virus early promoter.
[0268] 80. The method according to embodiment 78, wherein the poxvirus specific promoter is a vaccinia virus late promoter.
[0269] 81. The method according to embodiment 78, wherein the poxvirus specific promoter is a tandem of a vaccinia virus early and late promoter.
[0270] 82. The method according to any one of embodiments 39-81, wherein the poxvirus is a synthetic poxvirus.
[0271] 83. A method of reducing or preventing the progression of a SARS-CoV-2 virus infection in a subject in need or at risk thereof comprising administering to said subject an immunologically effective amount of the recombinant poxvirus according to any one of embodiments 1-24 or the pharmaceutical composition according to any one of embodiments 25-29.
[0272] 84. A method of reducing or preventing the progression of a SARS-CoV-2 virus and a poxvirus infection in a subject in need or at risk thereof comprising administering to said subject an immunologically effective amount of the recombinant poxvirus according to any one of embodiments 1-24 or the pharmaceutical composition of any one of embodiments 25-29.
[0273] 85. The method of reducing or preventing the progression of a SARS-CoV-2 virus and a poxvirus, wherein the poxvirus is vaccinia virus, variola, horsepox virus or monkeypox virus.
[0274] 86. A vaccine against a SARS-CoV-2 virus comprising a recombinant virus according to embodiments 1-24 or a pharmaceutical composition according to embodiments 25-29.
[0275] 87. A bivalent vaccine against a SARS-CoV-2 virus and a poxvirus comprising a recombinant virus according to embodiments 1-24 or a pharmaceutical composition according to embodiments 25-29.
[0276] 88. A bivalent vaccine against a SARS-CoV-2 virus and a poxvirus, wherein the poxvirus is a vaccinia virus, variola, horsepox virus or monkeypox.

The application's sequence listing, which the Patent Office published only in electronic form, follows.

SEQUENCE LISTING (65 sequences)

SEQ ID NO: 1 - DNA, 534 bp, Artificial Sequence
  Description of Artificial Sequence: Synthetic polynucleotide
atgaacggcggacatattcagttgataatcggccccatgttttcaggtaaaagtacagaattaattagacgagttagacgttatcaaatagctcaatataaatgcgtgactataaaatattctaacgataatagatacggaacgggactatggacgcatgataagaataattttgaagcattggaagcaactaaactatgcgatgttttggaattaattacagatttctccgtgataggtatcgatgaaggacagttctttccagacattgttgaattctgtgagcgtatggcaaacgaagaaaaaatagttatagtagccgcactcgatgggacatttcaacgtaaaccgtttaataatattttgaatcttattccattatctgaaatggtggtaaaactaactgctgtgtgtatgaaatgctttaaggaggcttccttttctaaacgattgggtgaggaaaccgagatagagataataggaggtaatgatatgtatcaatcggtgtgtagaaagtgttacgtcggctcataa

SEQ ID NO: 2 - DNA, 534 bp, Artificial Sequence
  Description of Artificial Sequence: Synthetic polynucleotide
atgaacggcggacatattcagttgataatcggccccatgttttcaggtaaaagtacagaattaattagacgagttagacgttatcaaatagctcaatataaatgcgtgactataaaatattctaacgataatagatacggaacgggactatggacgcatgataagaataattttgaagcattggaagcaactaaactatgtgatgtcttggaatcaattacagatttctccgtgataggtatcgatgaaggacagttctttccagacattgttgaattctgtgagcgtatggcaaacgaaggaaaaatagttatagtagccgcactcgatgggacatttcaacgtaaaccgtttaataatattttgaatcttattccattatctgaaatggtggtaaaactaactgctgtgtgtatgaaatgctttaaggaggcttccttttctaaacgattgggtgaggaaaccgagatagagataataggaggtaatgatatgtatcaatcggtgtgtagaaagtgttacatcgactcataa

SEQ ID NO: 3 - DNA, 33 bp, Artificial Sequence
  Description of Artificial Sequence: Synthetic oligonucleotide
  modified_base (11)..(13): a, c, t, g, unknown or other
  modified_base (16)..(33): a, c, t, g, unknown or other
aaaattgaaannntannnnnnnnnnnnnnnnnn

SEQ ID NO: 4 - DNA, 32 bp, Artificial Sequence
  Description of Artificial Sequence: Synthetic oligonucleotide
  modified_base (21)..(26): a, c, t, g, unknown or other
ttttttttttttttttttttnnnnnntaaatg

SEQ ID NO: 5 - DNA, 40 bp, Artificial Sequence
  Description of Artificial Sequence: Synthetic oligonucleotide
aaaaattgaaattttattttttttttttggaatataaata

SEQ ID NO: 6 - DNA, 29 bp, Artificial Sequence
  Description of Artificial Sequence: Synthetic oligonucleotide
ttttattttttttttttggaatataaata

SEQ ID NO: 7 - DNA, 15 bp, Artificial Sequence
  Description of Artificial Sequence: Synthetic oligonucleotide
aaaattgaaaaaata

SEQ ID NO: 8 - DNA, 50 bp, Artificial Sequence
  Description of Artificial Sequence: Synthetic oligonucleotide
ttttattttttttttttggaatataaatatccggtaaaattgaaaaaata

SEQ ID NO: 9 - DNA, 3822 bp, Severe acute respiratory syndrome coronavirus 2
atgtttgtttttcttgttttattgccactagtctctagtcagtgtgttaatcttacaaccagaactcaattaccccctgcatacactaattctttcacacgtggtgtttattaccctgacaaagttttcagatcctcagttttacattcaactcaggacttgttcttacctttcttttccaatgttacttggttccatgctatacatgtctctgggaccaatggtactaagaggtttgataaccctgtcctaccatttaatgatggtgtttattttgcttccactgagaagtctaacataataagaggctggatttttggtactactttagattcgaagacccagtccctacttattgttaataacgctactaatgttgttattaaagtctgtgaatttcaattttgtaatgatccatttttgggtgtttattaccacaaaaacaacaaaagttggatggaaagtgagttcagagtttattctagtgcgaataattgcacttttgaatatgtctctcagccttttcttatggaccttgaaggaaaacagggtaatttcaaaaatcttagggaatttgtgtttaagaatattgatggttattttaaaatatattctaagcacacgcctattaatttagtgcgtgatctccctcagggtttttcggctttagaaccattggtagatttgccaataggtattaacatcactaggtttcaaactttacttgctttacatagaagttatttgactcctggtgattcttcttcaggttggacagctggtgctgcagcttattatgtgggttatcttcaacctaggacttttctattaaaatataatgaaaatggaaccattacagatgctgtagactgtgcacttgaccctctctcagaaacaaagtgtacgttgaaatccttcactgtagaaaaaggaatctatcaaacttctaactttagagtccaaccaacagaatctattgttagatttcctaatattacaaacttgtgcccttttggtgaagtttttaacgccaccagatttgcatctgtttatgcttggaacaggaagagaatcagcaactgtgttgctgattattctgtcctatataattccgcatcattttccacttttaagtgttatggagtgtctcctactaaattaaatgatctctgctttactaatgtctatgcagattcatttgtaattagaggtgatgaagtcagacaaatcgctccagggcaaactggaaagattgctgattataattataaattaccagatgattttacaggctgcgttatagcttggaattctaacaatcttgattctaaggttggtggtaattataattacctgtatagattgtttaggaagtctaatctcaaaccttttgagagagatatttcaactgaaatctatcaggccggtagcacaccttgtaatggtgttgaaggttttaattgttactttcctttacaatcatatggtttccaacccactaatggtgttggttaccaaccatacagagtagtagtactttcttttgaacttctacatgcaccagcaactgtttgtggacctaaaaagtctactaatttggttaaaaacaaatgtgtcaatttcaacttcaatggtttaacaggcacaggtgttcttactgagtctaacaaaaagtttctgcctttccaacaatttggcagagacattgctgacactactgatgctgtccgtgatccacagacacttgagattcttgacattacaccatgttcttttggtggtgtcagtgttataacaccaggaacaaatacttctaaccaggttgctgttctttatcaggatgttaactgcacagaagtccctgttgctattcatgcagatcaacttactcctacttggcgtgtttattctacaggttctaatgtttttcaaacacgtgcaggctgtttaataggggctgaacatgtcaacaactcatatgagtgtgacatacccattggtgcaggtatatgcgctagttatcagactcagactaattctcctcggcgggcacgtagtgtagctagtcaatccatcattgcctacactatgtcacttggtgcagaaaattcagttgcttactctaataactctattgccatacccacaaattttactattagtgttaccacagaaattctaccagtgtctatgaccaagacatcagtagattgtacaatgtacatttgtggtgattcaactgaatgcagcaatcttttgttgcaatatggcagtttttgtacacaattaaaccgtgctttaactggaatagctgttgaacaagacaaaaacacccaagaagtttttgcacaagtcaaacaaatttacaaaacaccaccaattaaagattttggtggttttaatttttcacaaatattaccagatccatcaaaaccaagcaagaggtcatttattgaagatctacttttcaacaaagtgacacttgcagatgctggcttcatcaaacaatatggtgattgccttggtgatattgctgctagagacctcatttgtgcacaaaagtttaacggccttactgttttgccacctttgctcacagatgaaatgattgctcaatacacttctgcactgttagcgggtacaatcacttctggttggacctttggtgcaggtgctgcattacaaataccatttgctatgcaaatggcttataggtttaatggtattggagttacacagaatgttctctatgagaaccaaaaattgattgccaaccaatttaatagtgctattggcaaaattcaagactcactttcttccacagcaagtgcacttggaaaacttcaagatgtggtcaaccaaaatgcacaagctttaaacacgcttgttaaacaacttagctccaattttggtgcaatttcaagtgttttaaatgatatcctttcacgtcttgacaaagttgaggctgaagtgcaaattgataggttgatcacaggcagacttcaaagtttgcagacatatgtgactcaacaattaattagagctgcagaaatcagagcttctgctaatcttgctgctactaaaatgtcagagtgtgtacttggacaatcaaaaagagttgatttttgtggaaagggctatcatcttatgtccttccctcagtcagcacctcatggtgtagtcttcttgcatgtgacttatgtccctgcacaagaaaagaacttcacaactgctcctgccatttgtcatgatggaaaagcacactttcctcgtgaaggtgtctttgtttcaaatggcacacactggtttgtaacacaaaggaatttttatgaaccacaaatcattactacagacaacacatttgtgtctggtaactgtgatgttgtaataggaattgtcaacaacacagtttatgatcctttgcaacctgaattagactcattcaaggaggagttagataaatattttaagaatcatacatcaccagatgttgatttaggtgacatctctggcattaatgcttcagttgtaaacattcaaaaagaaattgaccgcctcaatgaggttgccaagaatttaaatgaatctctcatcgatctccaagaacttggaaagtatgagcagtatataaaatggccatggtacatttggctaggttttatagctggcttgattgccatagtaatggtgacaattatgctttgctgtatgaccagttgctgtagttgtctcaagggctgttgttcttgtggatcctgctgcaaatttgatgaagacgactctgagccagtgctcaaaggagtcaaattacattacacataa

SEQ ID NO: 10 - DNA, 669 bp, Severe acute respiratory syndrome coronavirus 2
atggcagattccaacggtactattaccgttgaagagcttaaaaagctccttgaacaatggaacctagtaataggtttcctattccttacatggatttgtcttctacaatttgcctatgccaacaggaataggtttttgtatataattaagttaattttcctctggctgttatggccagtaactttagcttgttttgtgcttgctgctgtttacagaataaattggatcaccggtggaattgctatcgcaatggcttgtcttgtaggcttgatgtggctcagctacttcattgcttctttcagactgtttgcgcgtacgcgttccatgtggtcattcaatccagaaactaacattcttctcaacgtgccactccatggcactattctgaccagaccgcttctagaaagtgaactcgtaatcggagctgtgatccttcgtggacatcttcgtattgctggacaccatctaggacgctgtgacatcaaggacctgcctaaagaaatcactgttgctacatcacgaacgctttcttattacaaattgggagcttcgcagcgtgtagcaggtgactcaggttttgctgcatacagtcgctacaggattggcaactataaattaaacacagaccattccagtagcagtgacaatattgctttgcttgtacagtaa

SEQ ID NO: 11 - DNA, 1260 bp, Severe acute respiratory syndrome coronavirus 2
atgtctgataatggaccccaaaatcagcgaaatgcaccccgcattacgtttggtggaccctcagattcaactggcagtaaccagaatggagaacgcagtggggcgcgatcaaaacaacgtcggccccaaggtttacccaataatactgcgtcttggttcaccgctctcactcaacatggcaaggaagaccttaaattccctcgaggacaaggcgttccaattaacaccaatagcagtccagatgaccaaattggctactaccgaagagctaccagacgaattcgtggtggtgacggtaaaatgaaagatctcagtccaagatggtatttctactacctaggaactgggccagaagctggacttccctatggtgctaacaaagacggcatcatatgggttgcaactgagggagccttgaatacaccaaaagatcacattggcacccgcaatcctgctaacaatgctgcaatcgtgctacaacttcctcaaggaacaacattgccaaaaggcttctacgcagaagggagcagaggcggcagtcaagcctcttctcgttcctcatcacgtagtcgcaacagttcaagaaattcaactccaggcagcagtaggggaacttctcctgctagaatggctggcaatggcggtgatgctgctcttgctttgctgctgcttgacagattgaaccagcttgagagcaaaatgtctggtaaaggccaacaacaacaaggccaaactgtcactaagaaatctgctgctgaggcttctaagaagcctcggcaaaaacgtactgccactaaagcatacaatgtaacacaagctttcggcagacgtggtccagaacaaacccaaggaaattttggggaccaggaactaatcagacaaggaactgattacaaacattggccgcaaattgcacaatttgcccccagcgcttcagcgttcttcggaatgtcgcgcattggcatggaagtcacaccttcgggaacgtggttgacctacacaggtgccatcaaattggatgacaaagatccaaatttcaaagatcaagtcattttgctgaataagcatattgacgcatacaaaacattcccaccaacagagcctaaaaaggacaaaaagaagaaggctgatgaaactcaagccttaccgcagagacagaagaaacagcaaactgtgactcttcttcctgctgcagatttggatgatttctccaaacaattgcaacaatccatgagcagtgctgactcaactcaggcctaa

SEQ ID NO: 12 - DNA, 228 bp, Severe acute respiratory syndrome coronavirus 2
atgtactcattcgtttcggaagagacaggtacgttaatagttaatagcgtacttctttttcttgctttcgtggtattcttgctagttacactagccatccttactgcgcttcgattgtgtgcgtactgctgcaatattgttaacgtgagtcttgtaaaaccttctttttacgtttactctcgtgttaaaaatctgaattcttctagagttcctgatcttctggtctaa

SEQ ID NO: 13 - DNA, 3822 bp, Severe acute respiratory syndrome coronavirus 2; identical to SEQ ID NO: 9

SEQ ID NO: 14 - DNA, 7 bp, Unknown
  Description of Unknown: Vaccinia Early Transcription Terminator Signal sequence
  modified_base (6)..(6): a, c, t, g, unknown or other
tttttnt

SEQ ID NO: 15 - DNA, 10095 bp, Horsepox virus
tgtgtgaccaacgaccgtaggaaactctagagggtaagaaaaatcaatcgctttatagagaccatcagaaagaggtttaatatttttgtgagaccatcgaaggagaaagagataaaacttttttacgactccatcagaaagaggtttaatatttttcttagtacaaaagttaatgttttaaaatatatggatgagaatatttgtctgtataaaaacttgtgtgaaattttgtaccaaagaaaaaacgtgagcagtatcccctatatggattttactagatcatttatatgccaaaaaatattatactatatacgtttattatatgatgttaacgtgtaaattataaacattattttatgatgcaattgtctagtaacctagatgggcatagggatattgataatctctacgagaatatattgttggacgttatcgtttacgaaatagttgaaacatcagaaagaggtttaatatttttatgagaccattgaagagagaaagagaataaaaatatttttgtaaaactttttttatgagaccatcgaagagagaataggaataggaatagtgatcatatcgtatcacatattgagacagaaaaagaagaagtaacgagatgtaactttttgtgaatgtagttaagaacatttttgttttgcaaaccggaatatagtgtccggtacacttttttaattcgtggtgtgcctgaatcgttcgattaaccctacttatccaatttcagatgaatagagttatcaattcagacacacgctttgagttttgttgaatcgatgagtgaagtattatcggttgcacctttagatgccgatccgtcgacatacttaaatccatccttgacctcaagttcagatgattccttgcacatgtctccgatacgaacactaaactctagatttttgacgcattttgtatcgacgatcgttgaaccgatgatatcttcgtaactcactttcttatgagagatgttagacccgagtactggatgggtcttgatgtcgctgtctttctctttttcgctacatctgatgttgatagacacctcacagtctttgatcatagccagagcttcttcacgagtgatcgcgggagagtccttaccttgtcctggggacacactggacaatctagcattcaccgtgtttccgtcagaggattcagagatggataaaatctttgggcattttgtgaatccaaagttcatgttaagacccgcaccaacgatactgtaataagtggtgggatctctttttacaacttcttcggatacctcatcgtctttggtctctgtaacttccgttacggattgacaaatcttatcatcggtcggtgtttggtcttgctttgtgactttgataataacatcaattcccatatgatgtttgttttcttcttccgtacacgaggatgaggatgaaaatgattgaagactggcaggcatagcagctgccgccaggcacatgcatgccaggacgatatattgtttcataattgctattgattgagtactgttctttatgattctacttccttaccgtgcaataaattagaatatattttctacttttacgagaaattaattattgtatttattatttatgggtgaaaaacttactataaaaagtgggtgggtttggaattagtgatcagtttatgtatattgcaactaccgggcatatggctatcgacatcgagaacattacccacatgataagagattgtatcagtttcgtagtcttgagtattggtattactatatagtatatagatgtcgacgctagatagacagtcgcccactagagttacagtctccaaatgcggcatgataccgtcatcattctttgctttcgttaactgtttggaggaaaaatttttgttattgcatttaatctcgaaattcagagtgcacacctttgaaatattttgatatctattttctcctgtaaagaaacctgaagttgctaccttattaaggacagagaagtattcctcacgaaatacgggattacagtctttatgattcatagtaatagttagttccgacgttgagatggattcgctgagaccggtagtggtcgtccgagtacacgatgtgtcgttaactggatacaggttaatttccacatcgatatagttaaacgtatttctgggtacgggttcgcatttatctgcggaagagacggtgtgagaatatgttccgagaccacacggaaaacagatgacgtctccggtagacgtgtgtccggatactccgtatcctattccacattttgtttgggaaacacatgccttgcatccggatgatcctttgagaagacaataatatccgggagagcattcacagattctattgtgagtagtgttacacgatcgcgtctctacctgattactatcgcatcttccgttacaacttagacaagcgggtaaatgattattgcgagatgtgaaggtacccgaaccacacggcgtacattgtgtgttagtcttgctatcgcataatctggaagcgtatgttcccggaggacacgataaacaacacaaattatggcgtttgtattcgttgtctttacactttccattggatggtgcatgcggtgctatatctcttccgtttattattatacatgagagaaacaatatatacaagtataatacggacttcataatttaataatgtagtaatcgttgtcttgttcttgtttcctacttctccaattatatagatattttttaaatattttctttctatcatggataatatttgtaatggttctttccgtacaacatactgtttagatgatagtcgcttagcttggttatgatattgcgcataatttccggaggcaaatacgatagtctagattggccatcgatggtagactctaatttattgagtgctttgtcgacgagtttacttttacgctccatcgatagatggcactgttctatgagatcgtcgtacatgggaaatgaaatgtgactgtctgaatgtatggctttaagatagctgtgataccgtatgtcttctgttcttaataccgtatacaggtcggtgtcggagattcgaatctctttaaggcgacttatgtcacgactgcatttttcgatgatggaatctatcttatcgaatgatatatttttcataaatacacttttatagtcctcgtttaaacagaatttactatgtagttccgcgaatgactcgtcccttaataggcagtaggctagtatcttttttacgtagtaatcgtcgtagggagagaattctgacatcttgtaaaacaacgatttaatcataggtagagatactttcagtctgtggtggatgatgtcattcacaacatccgccttgtatatgatgtttctgttttcaaacaccaagtcgaataccgtcttatcgtctttagtcggaaggttgatgtcgtatccgatgtatacgaggtatgaggcaacattgttgttacaattttgaaaggcggtatgaagaggagtcatggtattatagtattcgtctttctgaatgtcgaacctatttagtagataccgtagtatattgagagtgtaacttccgtatccttgattatgttttatgaatagataaagtagatgttgtccttcttccttttgtaatttcccgtatttttgttcgtgccaattgagtaacattatgagaatatgacctgttgcacaatcgttctttatgtattccatgatgggtgtacaatcaagattattacgtatcctcgtatcggctcctcgagataaaagagcatacaccacacgaggactatgtttggtatactgttgaaggtaagtgtgtaacggcgtatttccgatttttgtaaccgcgttaatgtttgctccataatctattatcgcgtagatgaatcgcttctcggctcgcatcttagtgtgacttgacttgtaataattgcttttgtagaacgtggatatgtgtttacagtagtaatgaagagaagtgagttcatcctcgtcggcgcaattagggtcggatcctttagtcaataatttgtacagaacgtaatagtttaagctcccattgaatttatatctaagataacacagcaatagatcggatgatttactaaagtcatcaatggtgtccgttagtatatcaaagatcttgttatcgattgatagtgaatgaatcagatagtggtgtagaggaatatgtcctttttcatccttgctatcaaagttacgcatgccgtggtgtaacaatatctttaatacagatggattaaatcgtgtattcatcgtatagcaatgtaatggagagttaccacattttagtcgtttattcagatcgcagtgtttaataactagcttaaacagatgagacgatgtatccacatcaaagaacgtaaaatacatatgacaaacattgttgacagaaacgtgaccttcattcttaccgtcgtccataaatacgttaggtatgtaccacatactgtcgcgaacgatgcgtacaatctcgtccatttcatccatctcataatgatttactttttcataattaaagatgtgaaagaaaaagaaaaccgaacaatatattttttagtaatgtttatgcgagacatataaaataaactccgtgtttatgatgccggtaaatgtttttatcatcttggacggaatcgattttgtaatatgtcatggaaacaaatgaaacaggacattatcgctccatgataaattatttaatggagtaataaagtatctcgagttgtatctccatgggtaatttcgaaatcaagttatcgtctgtattaatgttgtccactatggagtcgatcctctcattgttctttacagtttctgtaatgatggacgttagttcttttttgtaccatttgatgttggatacaaagtttataaatgtcggattctttgcgtatctcaatctgtggcgtttgcttcgtttaaataatatatcaaacatggagacgcctgatatgtaggcattcttcattctattaatgtctactctatagcgctttagttccttatgatgaccggcgatatcatacttactttagaaggaaaatcatcatctatgattaaggcgtatctgatacatgccgataatggttcaggatatagatagcgtatatctctattaaatgcgtcaatcatagtctctagagtgggatggtagctaagtaataaatcaactatcctcgttttgttttctctttggtaactgcttttctggatggccgtattgattatcgagcgtgatgttgtaacactcgctccatattccaataaccgctttgcaaattgtatattattgacatcgaccgcgtaatatagtagagttttattctcattatcgatcatatctatattatccatgtacttgcttagtatatcaaatacatctattagtatggtttcataacagtgatacccgcaattattaaatctcgataatatcagaccgtacatacatagacggccattgttagatatgtgatttacagccgcgtgtccatattttccacgataaaccttacgacgtttacatcgacgagattattattaacaaagtagtcgtgagaggatagttgttgtccgttgtcttatccatggtcgctccgttatctaacatgcatcgaacgataggtatacttaccatatcgccgtaatgtaagtagtttatcaacatggcttgtacgatggattcatcctgttgtctaaatctctttagaatgttatcaatgatgtagtggttatattctctggaatcgtacgaagtaatactacgcattacgtcgacaagagtatgacgtctctcaataagaagattaacgatttccatgtctacattatatggggttactctaaatcgcttgtttagataatccgctaatacgcctctaatatagggctgactgacgtcgtcgtatactctacacgtgtccacatcctttattaataataatttaacaatctctatatctatggttgagaaagaccagtagtattggatgggtaaagatcctccttcgtctctgccatggatggaaacattgttattgatcaaacatttaattacatccttggatagagattgagattgagattctctatgagacgatatatagtaatgaagagagttcttacacatatcactgttgtacatacaggtacgaaatacgtaaccggtgctgtaacattctgatttaagaagccatagcaatacttctggtctcggattaggcgtcgttacgtatatatccaccaatccgagactattgtttgcataattcgtattcttggacggacgtatccgtttatccacaattaggtattttagcagacgtaagtcgatattatccgaagacatatacgaatacagatcgaaatcatttatattcgacttgagtttgttagaggaattcgaatagctggatatcagtagatgcacaatttgagatttgacgtatctatgcttactgtatactcctagcggagttaatccttcgttgtttctacaaagtctctcgactccgcgagagagtaacagccgaacaatcttaatgtctgtatcgcatttattgaagacgtaacaatgtagcgcattgtttcctcgtctatctatatgttttgataagttgtgacacgtttcaatttctagttttattttttcgtacgtcacatcttcatccagtagacgacatagaatacatgtgcaatctctgacgcaatccatagctattctggtgctaattattcctatattatatttcacgaaaaatgatgaaggcaatcattcctcataagatgataaaaagtaaggtgggtgtgataaaaagtgtagtgagtgagtgagtgagaaagtaagagtattagtgagagagcatgaaggagatttagtatttagcagtgcggatatgatccaagagggtgagatagtcgttttcgttcagaatctttcgcagcataagtagtatgtcgatatacttatcgttgaagactcttccagagacgatagctgattgagtacaaagtccaatgattgcacgaagttcttcggcggttttcatggagtcatttctgatgaaacatttaatgatctccacgcaattgtcgatattgtcccacggaagtgaatccgagaactccttcaactcaccaccaaagagctccgttgcatcagttctgaaagagatgagaagcctgtagagagaccctgcgctttctctatgggtccatctatgagaaacccacaggatgtattcagtcagacaatgtctgacgtcggccacggtatacagggagtccttagtagcgtggcaatgacagggtctgaactgggcacaaggaaaggccattgtaaaggtagacgaaggttaacctgatggtagacctgtagccgtctatgctaatagagggctttaatttccatttttttaatgggttgtggatgaggaatgagagtgtcttatttcgtccttggtttacatggatcagagtgagaaaaaaatatcttgtatattattaactaacaaccttggtttccaaatagcttaagaaggcatttacacataatggagatatattccagcagaaaactggataaccgtccaaagtattatttgatatagtagtttttgatataatagacgcgaccccaatagcagtttttgtaaattgaacagggtctatactatgagtaacgtctgatttctgtttaagtttcgtatacaagtcaatgttatagacataatccatatcagagttagagtcataaatatcttttagtacagtaacgcgcatatcatgtataaatggttccccatacgtttcaattgctaagtcctcataagtcgtaaactctttgaatattggtcccatatcatcaatgtttagattatgtacaattctcaaatacgctttgacaagattataaaaccctcttacttgagttttagctacgataactgaaaatggcatatatttgataaactcctaaaagaataattttgtcagggctccatctctcatcaagttacatgtatttgtaataacgtcatttacagtactatttttttgtaaatctaaatttttaatgattctattaacttcttgattattcatggccttaatagcattggatattttatcatccatgtttaaaaaataacctatatgttaatacttgatattgatattaataattagtataattactatgtattatatttcattattatgaggaggatttatgtcatatcatgaaattaataagagaactagattaaagtaatagtaataggaataggaataggaattacttttcgtttgtctcactattataaaaagatgttatatctcaatcactgctataaagatccatcatatactatgatactgtatcagtttctatcaatctctgttttgggtgaattcaaaaaaaattaataatacctagaaaatattccatgagcatttcttttatcgatatagcatttggatagcctgtcaatatcgacatcattgaacaacggattcatcttacacttttcacgaacatcctgagatacattgttccatcttataacccgaattagatcattgtcttcagggaacttagttagccaatcaagaataatatcaatgacctcatcttctttgacatctagatagtcgcagtttatgatattaaacatagaatctgctgatatcaattgtttgaatctaacatccttatacaatgtttcaatctcattagcaatgttttcctcaatcatagtcatgacattgtatttatcctccatttccttatatctattgctaaacaactcatacatctcaagagcgtttctttcatctatcatataatgaaagatacgaactgttgcatggcccaagatctcagaatcaaggaagcgagcaagatcaaacatttcaactacatcttccaactcaagattatccatgactcctgtgtatatgaaatcaatggccatctcgataacaaaacctgaataatcaatattgaagattttttgatctggatcattacttagcatctcagcaaagtatgtagaaaatccagatacagccaccttatgtgcgataatgtcgttgttatcttttgtgtggaatgttatatcacaaaactttccagattttctaagattattcatattgctagctagatcatatctatgtttcacacacaattctttctcatgttcgttaaggtcgtacccacgaacaaaatagtaatcactcattctgacgacagcataaacagtaactaatttttctatctttagagagtatctccctattacctcattatgataatgtgtaaatagatacttcttaataatgtatagatgctgtctataaaaaaatcattcatgggtttgtgtttggacgcttttcatagactgtagtaagtggtcaatattacatcctatgtaatcaatagcagggttagttgcataatatttcatatacaagtcacgcacgatagctatctatctaattaattgttctagtcgcacacatatttggaggtatatagctaatatcgattatgtttcctatatgaatagtagcagtatcctcttcaaatccctcattggtattgacatacgcgatagagatggagatctgatagacagttgcctattaaagtgaaattttcagcgtgtgttgatgctttttcaggaacgcgtgtaaaattaccgattaatacaggttccgtttcagcgttacattttacttttatattcagcgtacacatcttggatgtattttgtttttttgtagtatctgtaaaaagtcctgctatagcagttttaccctttacagagtaatattctgttacaaagactggattgcaatctgttctattaacagtaattgtcaatttagaagtcgtgataacatctgatgattgttttgtacttagtcgattacaagatgatacgttaactggatatagttcaaaatctagagaaatgtagttaaatgtagttaaatgtatctgtaatgtatttgtcttcaaagaaaccgggtgtaggataatcattt

SEQ ID NO: 16 - DNA, 16257 bp, Horsepox virus
attaataatacctagaaaatattccatgagcatttcttttatcgatatagcatttggatagcctgtcaatatcgacatcattgaacaacggattcatcttacacttttcacgaacatcctgagatacattgttccatcttataacccgaattagatcattgtcttcagggaacttagttagccaatcaagaataatatcaatgacctcatcttctttgacatctagatagtcgcagtttatgatattaaacatagaatctgctgatatcaattgtttgaatctaacatccttatacaatgtttcaatctcattagcaatgttttcctcaatcatagtcatgacattgtatttatcctccatttccttatatctattgctaaacaactcatacatctcaagagcgtttctttcatctatcatataatgaaagatacgaactgttgcatggcccaagatctcagaatcaaggaagcgagcaagatcaaacatttcaactacatcttccaactcaagattatccatgactcctgtgtatatgaaatcaatggccatctcgataacaaaacctgaataatcaatattgaagattttttgatctggatcattacttagcatctcagcaaagtatgtagaaaatccagatacagccaccttatgtgcgataatgtcgttgttatcttttgtgtggaatgttatatcacaaaactttccagattttctaagattattcatattgctagctagatcatatctatgtttcacacacaattctttctcatgttcgttaaggtcgtacccacgaacaaaatagtaatcactcattctgacgacagcataaacagtaactaatttttctatctttagagagtatctccctattacctcattatgataatgtgtaaatagatacttcttaataatgtatagatgctgtctataaaaaaatcattcatgggtttgtgtttggacgcttttcatagactgtagtaagtggtcaatattacatcctatgtaatcaatagcagggttagttgcataatatttcatatacaagtcacgcacgatagctatctatctaattaattgttctagtcgcacacatatttggaggtatatagctaatatcgattatgtttcctatatgaatagtagcagtatcctcttcaaatccctcattggtattgacatacgcgatagagatggagatctgatagacagttgcctattaaagtgaaattttcagcgtgtgttgatgctttttcaggaacgcgtgtaaaattaccgattaatacaggttccgtttcagcgttacattttacttttatattcagcgtacacatcttggatgtattttgtttttttgtagtatctgtaaaaagtcctgctatagcagttttaccctttacagagtaatattctgttacaaagactggattgcaatctgttctattaacagtaattgtcaatttagaagtcgtgataacatctgatgattgttttgtacttagtcgattacaagatgatacgttaactggatatagttcaaaatctagagaaatgtagttaaatgtagttaaatgtatctgtaatgtatttgtcttcaaagaaaccgggtgtaggataatcatttgcaaacgatgtaacaaataataatgcgaatattagtattgtgtttatgtttatgtttatcatgatgagtatttatgataacaaagttttgtattatccggagtggtacagcattggtcggttggttctattttctttattgtggtatcaggagtacatctggcacaactattgactgcaggtaccgtacattttaatcctggaccacattgacattttcgtggtttattaggtccacatggttgtatctctaccatattgcttaaacaagtaacacacgccgtacataaaccatcttcaggttcaagatagtaatcattaggacacgttttaccaaatgatgtatatactaggcaggttacgatagcggataaaaagatagtattcatcttcatgctatttaatacatctaatatatgtattagttattaaaaaaatattattttatagaaactttgtgtgtgtatccagaacaattttatcttagtcactctttatctgtaagtcgagcattgataaatgtggcatgttgtctgttaattattatttttttaaaatacgttagtctaaatatcccgataatgcaactaaataaaagagtaacgggaatacgcataacgggatacatatccatgatatattttaatatgtcattggctatataatacatatatcgcgcatctgttatgtacgtattaattatatcatataatggatcattaccatgacaacacgctactagattgtgattttccctatatgcgattatgtcctctttgtaacatttaccaactagtatatcgtatatgctaatattagttctcgaattaatgtgtaactttgtcaacttatcgatgttatttctaatgctaactaacttatcaaatgccaaaaacattgcatgactattatcgagaatcgctatatccctctccatatactcgatgcatttattacagtaatccaatccagctaacataagagccaatctcaatgttggtttaatgatatcatgttcacataataataacgatggaaactttccactagtgtaacacttatctaagaatgatataaccatgtttacattaggtctcttatcgagaatattcttaacaagataccattggtggcccgacaacatattattttccatggttaacattagaggatctacaccattttttgttggtgtattaatattggcttgaatggataataagtaccacaaatgaatccatgacaatattggcattagtatgtgagataatagatacatgtaatggtgtcataccagatgttttacatactgcgttattatatctttctataatagcacaatgatatacgtcatgtatatttgtactatcgtacggctcatattcatcagtatataagttagtaggtatattatatttagcaacaatatgatgaataatgcatggagtgtcggctactctaattaatagatcctgaagtatgcgattttttaccatattcaatactttattagatatcaggcaatctattatgtcataatacatataattttgagcagtgcatatatatgaagttaatggagtataccctaaacaattgacggctgttatatcagcacccaaggatagcagacactgaataacatctcttatatcgttatcggtttttggatctaatatatgaacaacagacaacatagagagatatgtgtgtagtaccatattaccaatattgtcgggttcatttatatcattcccgtactcgtgtaaaagtttaatgatgctagtacttatgttgtgtcgcagaatatattgatgaagacaagtccttccagcactatctttataatgtagttttattcctggttgtaaaaaggagtaaacgactgatatatcgatattccgagctagtgttatatacgagtggagcatcataggtatattttttactttattgccatctagtgattctatatacaagtttgttatttttggattaatattatctatattggctatgtatatcataatcggactcattccattaacgcatttcatatccatatctccccaagttcgataatctttttaattacgtgtacacaaacatttcctgttatcatgtacgtgtgcaacggagtgataagatcacgattctgtaaatttacatttactccgttattgcataaccactctaatatatctatatcaacatccatgttgccgagatacgcgtgtaggataccgtatcctgttttcttgcatacataattaagatttacaattcctacatctaccatatatttagtcaagtctagttttatatggcgagttctcggtgaattgaaatacgtatatagaatatccatatctccattgttgggaatattaaacacatgattggtggttttacttttattatctttaataatacatttgacgaattttttatactgatcaaccaacgatttgttttttctatccgcttttagcattaaagtcatactaccgatgatattaatcaatgcggttttactatctgtatactgttcacgttgtctattatcaatacaataatatttctttttaaaaacttttatgcgtttagctctaactatgtgattataactgtatatatccccatcgctacagtatccatcatctggatcatcattatttatacgagcattagtgcttatacggttatcaaaatcttcaaagtatgtcgaatatatcagttttctgacattaactatagcgtgttcggttaatgatgctattttgataactataatcaaaaactgtcagtgtgttggtagtgcataaaaagtttatattattgttacattttttaaaaagatcaaggtataaaaattagaagtgttagattatattaattatactataaaaattagaagtgttagactattaactaacttataaaactatcttataaaactatcttataactattaactaacttataaaactatcttataactattaactcatttcaagaagggtgggtggagaaaactctatatgatagcttgtgaaacaattagatccctaatttctaatggaagttttgataggagattgtcatcagttgatacattgtttattatctcatctattagagcacgtctgtttagagctttagtgacatgctcgtttacttctgtgtaaatcttgaatcctttagtgatacactgtgtcaaaactggatgtttagaatacctatgtagaatatgggaagcatgcttgtttttgtccttattatagattaactcatacatggttgtattatgaattttcatctgcctaatgtactccaattcttgtttacaatcaattatataatcaaagagtgatgatgcatacacattacaaagtgaataatctaccatcataaaatacttgatacagagctttattacatcatggttttcaattgtattattaagtatagataattttatacagtcaatagacaatggttctctaagcaatatttctaatattttaagatgtgcttccctactggcgataacagatcccctatccacagccacgtcaagacatgtatatccatcactcattactgcgttgacatttgctccattttctaatagccatgatactaaatctatataacctgcatagatagcgcgataaagcaaggtccttccaccagcatctagttgattaatatcttcaatatatgggatacaaagcttacaaatttctaatactgtgggttcatctacaaggaatcccctagtatactgaattattttatataaatctaacttaacatcattttcatctgggataccacaatttaaaataaactcaacaacactactttcctttttacacattcccctaaaataggcattcaagcattctattttatatattacagccccatgatctaccataaaattaacaatgtctatttttacatatgcattagatagatagtaaagtaagagatcttgcacagaattacaattcttaataattataaagataatatcttccatataattctttgacactaatgcagatataatatctttatatgtaatatatgtaaacagtctatctactatatactgatcaatattatctctatgaatcctaaaataatcatacagaacatctacaggatcacaaattggttcaaggagaaatctatcaaatattttcctgtcaacaactggttctagaacataacagtcaacacccaatccatgttttacatagtcatctaccaaagataatgaccaaatgttgaggtcgtcgtgaaactgctcatcaacagccatgaaatctgccgactccatggtgcgaatcgcactgtcttattcgccattgattttcattttttataattatgtacatgatttccttctattctcaagagtctacaaaatatatattttttcgatatctaagtactaagttttttactgtttttgttactgtcccattcttctaactaaagatctgagataaattatacaatcttcgctatcaaaccatttttgtagtttaaagcctgaagtaattagccaactgtttttattagcggcttttttcgatctatcaatttcagtatattcttcgctgttataaaagtaatgttgtttaattgtaggacggttgttagtataatcacatgaataataatattctaattcctcgtattaactacttacagatactcgaaatagtctgaaaaattcttcaaagatatttttataaagatctaggaaaagtttattaccaaccatgaacgcgataaatggataaatatcctttccatcaaaggtcataattggataattgtccagcaatatatctgctgtattagttatatcacttccatttattttcagattgaagtaatgtactagtttgtgacaattaacaagagacaaaagagatgccgatactaatacgtaaatagctatacgcgaatccattgttacttttttatttcatacgtctattaataaatatatgtattacttaagactagaaaaatcaaaagtgagtttttgatatttgattcttacttattgtgggattgtagtttactaagtaattcatctctgaatcctgataaatcatgcatatcattgatacaactacgcagtaaactagtaggaatacaaatatctggatatgtacgtaaatagtcgattatatcttttacaatactattagtccctattgcgttatctatatatccattaataatattacacagtggatacttatcagaagtatacctcttacagatttctatacataaagtaatatcattattgtatgttttgcttattagtatcatatataaatatagtagaatagttgttaatatatgtagacattaataaactaatattatctcgaatatccactatcacgtctaaagtttgactcagtgatctataattagatgtattttgtgtttccaaatcatgttttatatgctcgataaatttgttacaattatttactcctatcaacataaatgcagaggccatcatttcatacaggctagtatttttagtactacataacgaaaataatgattcgtttttatagcatttatctaaaaatattataatattatctatagaaggtctgttatctagtaacatcttaactatatgacacttattatatcgatctctatgaaatattaacatcaatgcagaaataccctttatagttggtttatcgatactatatccaatagataataaatatttcattgcatctttgagtagacaaacggtggctacgtgaaacgcagtcattccagaaaatggtactatattcttatagtactttatcatttgacaatgatatgcatcattagtttcgtaatcacacttttcatattcatcggtgtatgagtctacaggaatattatatttagtaataacatgatgaattattggcagcgatatatcttctctagttattagatcttggattatacaatgctttaccatgtttaatactttatcagacatcagacaatctattatgtcgtgatacatataattttgtgcggtacatatgtaggacgttaatggggtataacctaaattattaaccaacgatatatctgatcctgaacgtataagatatttaacaacttttatgtttatattgttattgatactcgaatcatatgtcaaattttattaacgatacataaatctagaaagatatgtgtgtagtactgtattacctaaattatcagtctcgtttaaatagttgccgtgttcgagtaaaagtttaacgacatcgatatttatataatttcgtaacatatagctgtgaagacaagtttttccaacactatctttgtaatcaaggattgcactattattcagaaaatgttttatgacatctagatcaacatattgagccatttgtatatacagatacaatatctctggtatattagttatcttgttatcgtccatgtaaatctttataatttcttcgtctatattcatcgcattatatattatataagttattataggagttaactttatacaacatctgagattcctatcagcacctagttcaataactttctttaacacgcttgctgaaattaattcgtctctccgtaaatatgaatgtaatggagtaattagattattgttttgttcatttatattctttccacttttacataataattttagtacatctgtgtctacatacatattaccgagatatgtatgcaatataccaaatccatattcgtttttataattaatatctacgcctttagcaatcatccatttaaccaattttatgttgatgcctatcgtgttatgtgctttgaaatatacagagaatatgttactactatatttgtcactgttttcataatgactatctcgtcctcatcatcactatcatcactatcatcatccttcgttcttattatcatctttatcatcatccttattgtccttatcatcgtctattaaacacaaattatctacgtttataacaacattctcatcattaattagttctgtagtaatatctttaataatttggctatatatctgttcaatactatctattgatgatttctttttatgacttgaactaatgtaatgacgatgaaattgagtagtagcttttaataaagacttgatatcattatcatatgtttgatcgtcgtaattaatagtgtggctaatggtactgttaataagtttatagacaatatcatagtattttctttccagaactagattattttttaatactgatctaacatatatgtcgtaactatcatactggttctcacaattccgtgatgtagcagtagttgatgcatggtctatatcgttaaaatgtatcgtatataatagttttctgacgtggagtacagaattttcgattaatgagttcatggtaaggaagggcgaatgaatgcctgtatatatgcataagttaatagttttttatcatatttttctaatactatataaaaatatcattatgtataatcatcactgtcgctatcattattgtgtttgtgtagttctgtcctatcatctacatcactgctactgtcactctcgctatatcttctaaaattacaaacaactggatattcgataacagcatttgagtagtttttgtcttttacagtatatacgttattgtcaaaatctaaacaaatattagcataatacctatctataagatcaagatccatgttcgagcatactagtgcatatttgtaacttcgtcgtacagcgttagatcaataaataaacaatcttataacgcaactttttacgatctagttgtatgagtttatcgtttacataagctattaacggctttaacagatgatctgagtaatatacctctgttatacatttaatgttcacggtcttagtatttttagatatcaattgtaatttacacccatatttaactcccttgtgtaacgttagacattctaaatctatagtattatctattacagcgtaaaacacatacatttttaacagcaacacattcaatattgtattgttatttttatattatttacacaattaacaatatattattagtttatattactgaattaataatataaaattcccaatcttgtcataaacacacactgagaaacagcataaacacaaaatccattaaaaatgttgataaattatctgatgttgttgttcgctgctatgataatcagatcattcgccgatagtggtaacgctatcgaaacgacattgccagaaattacaaacgctacaacagatattccagctatcagattatgcggtccagagggagatggatattgtttacacggtgactgtatccacgctagagatattgacggtatgtattgtagatgctctcatggttatacaggcattagatgtcagcatgtagtattagtagactatcaacgttcagaaaacccaaacactacaacgtcatatatcccatctcccggtattatgcttgtattagtaggcattattattattacgtgttgtctattatctgtttataggttcactcgacgaactaaactacctatacaagatatggttgtgccataatttttataaatttttttatgagtatttttacaaaaatgtataaagtgtatgtcttatgtatatttataaaaatgctaaatatgcgatgtatctatgttatttgtatttatctaaacaatacctctagctctagatattatacaaaaattttttatttcggcatattaaagtaaaatctagttaccttgaaaatgaatacagtgggtggttccgtatcaccagtaagaacataatagtcgaatacagtatccgattgagattttgcatacaatactagtctagaaagaaatttgtaatcattttctgtgacggaagtccatatatctgtatcatcgtctagtttatcagtgtcccatgctatatttctgttatcatcattagttaatgaaaataactctcgtgcttcagaaaagtcaaatattgtatccatacatacatctccaaaactatcgcttatacgtttatctttaacgatacctatacctagatggttatttactaacagacattttccagatctattgactataactcctatagtttccacatcaaccaagtaatgatcatctattgttatataacaataacataactcttttccgtttttatcagtatgtatatctatatcaacgtcgtcgttgtagtgaatagtagttattgatctattatatgaaacggatatgtctagaacagcaattgtcttacgtccagttaacactttctttgatttaaagtctagagtctttgcaaacataatatccttatccgactttatatttcctgtagggtggtataattttattttgcctccatatatcggtgtttccaaatatattactagacaatattccatatagttattagttaagggtacccaattagaacacgtacgcttattatcatcatttggatcgtatttcataaaagttattgtgttatcgatgttaacacattctacattttttaattgtctatatagtatttttttgatattttctataatatcagaattgtcttccatcgaaagttgtatactatcagaatcagttacatgtttaaataattctctgctgtcattccttatacaatcaaattcattattaaacagtttaatagtctgtaaacctttatcgtcgtaaatatccattgtcttattagttacgcttatttttatgtgtttttacgttgctttattatattttataagaatgattgtttgacgaatcacgagaactattaagacatatattattagaggtatatattataaaaaagtttttgattacgttgttataagaggagaggacacattaacatcatacatcaattaactacattcttataacatcgtaatcaaaagaattgcaattttaatgtataacaactgtcaatgggttatggaattgtatattacatattatacggtatgttggtaacgacaaataccgatcggtaatcgtttgccggtgtaataaaattatatatatctatctattacaccggctgagtatgcataataataagttgtgggtagtatcatccacatatttataatttaggactttgtattcagtatttttggaatcataaaaaaataaaaaagttttaccattttaaaatttaaaaagtatttacattttttcactgtttagttgcggatatggaatttgatcctaccaaaatcaatatatcatctatagatcatgtaacaatattacaatacatagatgaaccaaatgatataagactaacagtatgcattatccaaaatattaataacattaaatattatatcaatatcacaaaaataaatccacatttggctaatcaatttcgggcttggaaaaaacgtatcgccggaagggactatataactaacttatctaaagatacaggaatacaacaatcaaaacttactgaaactatacgtaactgtcaaaaaatagaaacatatatggtctatatatacactacaatttagttattaatgtggttattgattggataaccgatgtgattatcaatcaatattaagagggttggtaaattggtacatagctaataatacctatactccaaatacacccaataatacaacaaccatttctgagttggatatcatcaaaatactaaataaatacgaggacgtgtatagagtaagtaaagaaaaagaatgtgaaatttgctatgaagttgtttactcaaaacgattagaaaacgatagatactttggtttattggattcgtgtactcatatattttgcataacatgcatcaatatatggcataaaacacgaagagaaaccggtgcgtcggataattgtcctatatgtcgtacccgttttagaaacataacaatgagcaagttctataagctagttaactaataaataaaaagtttaatttgttgacgacgtatgtcgttattttttctcgtataaaagattaatttgattctaatataatctttagtattggataaatatcaattcaaattaattccattagattatatcataaataaaaatagtagcacgcactacttcagccaaatattcttttttgaaacgccatctatcgtagtgaggacacaagtgaacctataatgagcaaatttattagtatcggttacatgaaggactttacgtagagtggtgattccactatctgtggtacgaacggtttcatcttctttgatgccatcacccagatgttctataaacttggtatcctcgtccgatttcatatcctttgccaaccaatacatatagctaaactcaggcatatgttccacacatcctgaacaatgaaattctccagaagatgttacaatgtctagatttggacatttggtttcaaccgcgttaacatatgagtgaacacacccatacatgaaagcgatgagaaataggattctcatcttgccaaaatatcactagaaaaaatttatttatcaattttaaaggtataaaaaatacttattgttgctcgaatattttgtatttgatggtatacggaagattagaaatgtaggtattatcatcaactgattctatggttttatgtattctatcatgtttcactattgcgttggaaataatatcatatgcttccacatatattttattttgttttaactcataatactcacgtaattctggattattggcatatctatgaataattttagctccatgatcagtaaatattaatgagaacatagtattaccacctaccattatttttttcatctcattcaattcttaattgcaaagatctatataatcattatagcgttgacttatggactctggaatcttagacaatgtacagtcatctataatcatggcatatttaatacattgttttatagcatagtagttatctacgatgttagatatttctctcaataaatcaatcacataatctaatgtaggtttatgacataatagcattttcagcagttcaatgtttttagattcgttgatggcaatggctatacatgtatatccgttatttgatctaatgttaacatctgaaccggattctagcagtaaagatactagagattgtttattatatctaacagccttgtgaagaagtgtttctcctcgtttgtcaatcatgttaatgtctttaagataaggtaggcaaatgtttatagtactaagaattgggcaagcataagacatgtcacaaagaccctttttgtatgtataagtgtaaaaattataacattcatagttggatttacataggtgtccaatcgggatctctccatcatcgagataattgatggcatctcccttccttttttagtagatatttcatcgtgtaagaatcaatattaatatttctaaagtatccgtgtatagcctctttatttaccacagttccatattccaacatgcattccactagagggatatcgatatcgccgaatgtcatatactcaattagtatatgttggaggacatccgagttcattgttttcaatatcaaaaagatggtttccttatcatttctccatagtggtacaatactacacattatttcgtgcggctttccattttccaaaaacaatttgaccaaatctaaatctacatctttattgtatctataatcactatttagataatcagccataattactcgagtgcaacatgttagatcgtctatatatgaataagcagtgttatctattcctttcattaacaatttaacgatgtctatatctatatgagatgacttaatataatattgaagagctgtacaatagtttttatctatagaagacggcttgattccgtgattaattagacatttaacaacttccggacgcacatatgctctcgtatccgactttgaatacagatgagagatgatatacagatgcaatacggtaccgcaatttcgtagttgataatcatcatacgcgtatcagtactcgtcatcctcgtcctcataaagaacactgcagccattttctatgaacaaatcaataattttaggaacaggatcattgtcattacataattttctataactgaacgatggttttcacatttaacactcaagtcaaatccatgttctaccaacacctttatcaagtcaacgtctacatttttggatttcatatagctgaatatattaaagtcatttatgttgctaaatccagtggcttctagtagagccatcgctatatcctttaactttaacatgtctactatttgtgtattcttctaatggggtagctgtctccaatttttgcgtaatggattagtgccactgtctagtagtagtttgacgacctcgacattattacaatgctcattaaaaaggtatgcgtgtaaagcattattcttaaattggttcctggtatcattaggatctctgtctttcaacatctgtttaagttcatcaagagccacctcctcattttccaaatagttaaacattttgactgaatagaagtgaatgagctactgtgaactctatacacccacacaactaatgttattaaatatcattttttgaatgtatttataccatgtcaaaaacttgtacaattattaataaaaataatttagtgtttaaattttaccagttccagattttacacctccgttaatacctccattaaccccactttttacaccactggacgatcctcctccccacattccaccgccaccagatgtataagttttagatcctttattactaccatcatgtccatggataaagacactccacatgccgccactaccccctttagaagacatattaataagacttaaggacaagtttaacaataaaattaatcacgagtaccctactaccaacctacactattatatgattatagtttctatttttacagtaccttaactaaagtctctagtcacaagagcaatactaccaacctacactattatataattatagtttctatttttataggaacgcgtacgagaaaatcaaatgtctaatttctaacggtagtgttgataaacgattatcgtcaatggatacctcctctatcatgtcgtctattttcttactttgttctattaacttattagcattatatattatttgattataaaacttatattgcttattagcccaatctgtaaatatcggattattaacatatcgtttctttgtaggtttatttaacatgtacatcactgtaagcatgtccgtaccatttattttaatttgacgcatatccgcaatttctttttcgcagtcggttataaattctatatatgatggatacatgctacatgtgtacttataatcaactaatatgaagtacttgatacatattttcagtaacgatttattattaccacctatgaataagtacctgtgatcgtctaggtaatcaactgtttttttaatacattcgatggttggtaatttactcagaataatttccaatatcttaatatataattctgctatt

SEQ ID NO: 17 - DNA, 16287 bp, Horsepox virus
aatgagctactgtgaactctatacacccacacaactaatgttattaaatatcattttttgaatgtatttataccatgtcaaaaacttgtacaattattaataaaaataatttagtgtttaaattttaccagttccagattttacacctccgttaatacctccattaaccccactttttacaccactggacgatcctcctccccacattccaccgccaccagatgtataagttttagatcctttattactaccatcatgtccatggataaagacactccacatgccgccactaccccctttagaagacatattaataagacttaaggacaagtttaacaataaaattaatcacgagtaccctactaccaacctacactattatatgattatagtttctatttttacagtaccttaactaaagtctctagtcacaagagcaatactaccaacctacactattatataattatagtttctatttttataggaacgcgtacgagaaaatcaaatgtctaatttctaacggtagtgttgataaacgattatcgtcaatggatacctcctctatcatgtcgtctattttcttactttgttctattaacttattagcattatatattatttgattataaaacttatattgcttattagcccaatctgtaaatatcggattattaacatatcgtttctttgtaggtttatttaacatgtacatcactgtaagcatgtccgtaccatttattttaatttgacgcatatccgcaatttctttttcgcagtcggttataaattctatatatgatggatacatgctacatgtgtacttataatcaactaatatgaagtacttgatacatattttcagtaacgatttattattaccacctatgaataagtacctgtgatcgtctaggtaatcaactgtttttttaatacattcgatggttggtaatttactcagaataatttccaatatcttaatatataattctgctatttctggaatatatttatctgccagtataacacaaatagtaatacatgtaaacccatattttgttattatattaatgtctgcgccattatctattaaccattctactaggctgacactatgcgacttaatacaatgataaagtatactacatccatgtttatctattttgtttatatcattaatatacggcttacaaagttttagtatcgataacacatccaactcacgcatagagaaggtagggaataatggcataatatttattaggttatcatcattgtcattatttacaactaagtttccattttttaaaatatactcgacaactttaggatctctattgccaaatttttgaaaatatttatttatatgcttaaatctatataatgtagctccttcatcaatcatacatttaataacattgatgtatactgtatgataagatacatattctaacaatagatcttgtatagaaactgtatatcttttaagaattgtggatattaggatattattacgtaaactattacacaattctaaaatataaaacgtatcacggtcgaataatagttgatcaactatataattatcgattttgtgatttttcttcctaaactgtttacgtaaatagttagatagaatattcattagttcataaccactatagttactatcgaataacgcgtcaaatatttcccgtttaatatcgcatttgtcaagataataatagagtgtggtatgttcacgataagtataataacgcatctcttttttgtgtgaaattaaatagtttattacgtccaaagatgtagcataaccatcttgtgacctagtaataatataataatagagaactgttttacccattctatcatcataatcagtggtgtagtcgtaatcgtaattgtctaattcatcatcccaattataatattcaccagcacgtctaatctgttttattttgatcttgtatccatactgtatgttgctacatgtaggtattcctttatccaataatagtttaaacacatctacattgggatttgatgttgtagcgtatttttctacaatattaataccatttttgatactatttatttctatacctttcgaaattagtaatttcaataagtttatatcgatgttatcagaacatagatattcgaatatatcaaaatcattgatatttttatagtcgactgacgacaataacaaaatcacaacatcgtttttgatattattatttttcttggtaacgtatgcctttaatggagtttcaccatcatactcatataatggatttgcaccactttctatcaatgattgtgcactgctggcatcgatgttaaatgttttacaactatcatagagtatcttatcgttaaccatgattggttgttgatgctatcgcattttttggtttctttcatttcagttatgtatggatttagcacgtttgggaagcatgagctcatatgatttcagtactgtagtgtcagtactattagtttcgatcagatcaatgtttagatctatagaatcaaaacacgataggtcagaagataatgaatatctgtacgcttctttttgtactgtaacttctggttttgttagatggttgcatcgtgctttaacgtcaatggtacaaattttatcctcgctttgtgtatcatattcgtctctagtataaaattctatattcagattatcatgcgatgtgtatacgctaacggtatcaataaacggagcacaccatttagtcataacagtaatccaaaattttttaaagtatatcttaacgaaagaagttgtgtcattgtctacggtgtatggtactagatcctcataagtgtatatatctagagtaatgtttaatttattaaatggttgataatatggatcgtcgtggcaatttcctaagacgaaaataagacataaacacgcaataaatctaattgcggacatggttactccttaaaaaaatactaataatcaccttggctatttagtaagtgtcatttaacactatactcatattaatccatggactcataatctctatacgggattaacggatgttctatatacggggatgagtagttttcttctttaactttatactttttactaatcatatttagactgatgtatgggtaatagtgtttaaaaagttcgttctcatcatcagaataaatcaatatctctgtttttttgttatacagatgtattacagcctcatatattacgtaataaaacgtgtcatctaccttattaacttccaccgcatagttgtttgcaaatacggttaatcctttgacctcgtcaatttccgaccaatctgggcgtataataaatctgaactttaattgcttgtacccatttgaaataatttttaatcgacatccgtagttatcccctttatgtaactgtaaatttctcaacgcgatatctccattaataatgatgtcgaattcgtgttgtatacccatactgaattgatgaactaacgaatatcaacggcgttaatagtaatttactttttcatctttacatactgggtactagttttactatcataagtttataaattccacaagctactatggaataagccaaccatcttagtataccacacatgtcttaaagtttattaattaattacatgttgttttatatatatcgctacgaatttaaagagaaattagtttaggaagaaaaaaattatctatctacatcatcgtctattggataacgtctctgtattctacgatagagtgctactttaagatgcgacagatctgtgtcatcaaatatatactccattaaaatgattattacggcagcgaacttgatattggatacatcacgacctttgttaatatccacgacaatagacagcaatcccatggttccataaacagtgagtttatctttctttgaagcgatagtttgtagagatcttataaaaccgtcaaacgacatcgcatttatatctttagctaattcatatatgttaccatcgtaatatctacccgcgtctatcttaaacgtttccatcgctttaaagacgtttccaatagatggtctcatttcatcagtcatactgagccaacaaatgtaatcgtgtataatatctttgatagaatcagactctaaaaaaaaggaatcggctttattatacacattcatgataaacttaatgaaaaatgtttttcgttgtttaagttggatgaatagtatgtcttaataattgttattatttcattaattaatatttagtaacgagtacactctataaaaatgaaaatgacataactaatcataactagttatcaaagtgtctaggacgcgtaattttcatatggtatagatcctgtaagcattgtctgtattctggagctattttctttatcgcattagtaagttcagaatatgttataaatttaaatcgaataacgaacatgactttagtaaagtcgtctatattaactcttttattttctagccatcgtaataccatgtttaagatagtatattctctagttactacgatctcatcgttgtctagaatatcacaactgaatctacatccaattttagaaattggtctgtgttacatatttcttctatattattgttgatgtattgtcgtagaaaactattacgtagaccattttctttataaaacgaatatatagtactccaattatctttaccgatatatttgcacacataatccattctctcaattactacatctttaagattttcgttgttaagatatttggctaaactatataattctattagatcatcaacagaatcagtatatatttttctagatacaaagacgaactctttggcgtcctctataatattcccagaaaagatattttcgtgttttagtttatcgagatctaatctgttcatatacgtatctatgattgtacggtacgttatgataaccgcataaaataaaaatccatttttatttttagctactattcataattgagattgatgtaatactttgttactttgaacgtaaagacagtacacggatccgtatctccaacaagcacgtagtaatcaaatttggtgttgttaaacttcgcaatatttatcaatttagatagaaacttatactcatcatctgttttaggaatccatgtattattaccactttccaacttatcattatcccaggctatgtttcgtccatcatcattgcgtagagtaaataattcttctgtattcggtagttcaaatatataatccatgcatagatcggtaaagctattgtagatgtgatttttcctaaatctaatataaaactcgtttactagcaaacattttcctgatttatcgaccaagacacatatggtttctaaatctatcaagtggtggggatccatagttatgacgcagtaacatagattattaccttcttaactgtcgctaatatctatatatttattgttatcgtattggattctgcatatagaacacataaccaatttatagtcgcgctttacattctcaaatctacagttaagagatttagaaaacattatatcctcggatgatgttatcactgtttctggagtaggatatattaaagtctttacagatttcgtccgattcaaataaattactaaataatatcccacattatcatctgttagagtagtatcattaaatctattatattttatgaaaaatatatcacttgctcacctctatatttcgtacatttttaaactgtttatataatatctctctgatataatcagatatatttattgtgtcggtagatgataccgttacatttgaattaatggtgttccattttacaacttttaacaagttgaccaattcatttttaatagtatcaaacgctccatgattaaatattttaatagtatccattttatatcactacggacacaaagtagctgacataaaccattgtataatttttatgttttatgcttattagcgtacacattttggaagttccggctgccatgtatttcctggagagcaagtagatgatgaggaaccagataggttatatccgtacttgcacttaaagtttacattgtcgttgtatgagtatgatcttttaaacccgctagacaagtatccgtttgatattgtaggatgtggacatttaacaatttgacacgtgggtggatcggaccattctcctcctgaacacaggacaccagagttaccaatcaacgaatatccactattgcaactataagttacaacgcttccatcggtataaaaatcctcgtatccgttatgtcttccgttggatatagatggagggaattggcatttaacagattcacaaataggtgcctcgggattccataccatagatccagtaaatcctaattcacaatacgatttagattctcctatcaactgatatccgctattacaagagtacgttatactagagccaaagtctactccgccaatatcaagttggccattatcgatatctcgaggcgatgggcatctccgtttaatacattgattaaagagtgtccatccagtacctgtacatttagcatatataggtcccattttttgctttctgtatccaggtagacatagatattctatagtgtctcctatgttgtaattagcattagcattagttttcacactattcttaaatttcatattaatgggacgtgaaggaataggacagtatgatagaacgcatcctattcccaacaatgtcaggaacgtcacgctctccaccttcatatttatttatccgtaaaaatgttatcctggacatcgtacaaataataaaaaagcccatatatgtttgctattgtagaaattgtttttcacagttgctcaaaaacgatggcagtgacttatgagttacgttacactttggagtttcatctttagtaaacatatcataatattcgatattacgagttgacatatcgaacaaattccaagtatttgattttggataatattcgtattttgcatctgctataattaagatataatcaccgcaagaacacacgaacatctttcctacatggttaaagtacatgtataattctatccatttgtcttccttaactatatatttgtatagataattacgagtctcataagtaattccagtaattgcatagatgtcaccatcgtactctacagcataaactatactatgatgtctaggcatgggagacttttttatccaacgatttttagtgaaacattctacatcgtttaatactacatatttctcatacgtggtataaactccacccattacatatatatcatcgtttacgaataccgatgcgcctgaatatctaggagtaattaagtttggaagtcttatccattttgaagtgccgtgtttcaaatattctgctacacccgttgaaatagaaaattctaatcctcctattacatataactttccattgttaacacaagtactaacttctgattttaacgacgacatattagtaaccgttttccattttttcgtttcaagatctacccgcgatacggaataaacatgtctattgttaatcatgccgccaataatgtatagacaattatgtaaaacatttgcattatagaattgtctatctgtattaccgactatcgtccaatattctgttctaggagagtaatgggttattgtggatatataatcagagtttttaatgactactatattatgttttataccatttcgtgtcactggctttgtagatttggatatagttaatcccaacaatgatatagcattgcgcatagtattagttataaacttgggatgtaaaatgttgatgatatctacatcgtttggatttttatgtatccactttaataatatcatagctgtaacatcctcatgatttacgttaacgtcttcgtgggataagatagttgtcagttcatcctttgataattttccaaattctggatcggatgtcactgcagtaatattgttgattatttctgacatcgacgcattatatagttttttaattccatattgtttagaaaagttaaacatccttatacaatttgtggaattaatattatgaatcatagtttttacacatatatctactacaggcgtaacatcaattattacggcagcaactagtatcatttctacattgtttatggtgatgtttatcttcttccagcgtatatagtctaatagcgattcaaacgcgtgatagtttataccattcaatataatcacttcatcatttatatggtgctcctgaattcgtttaaaaaaattatacggagatgccgtaataatttccttattcacttgtataatttccccattgatagaaaacgtcacgctttccattcttgaagtactataagtaattatagtataatgtaaacgtttatatattcaatatttttataaaaatcattttgacattaattcctttttaaatttccgtctatcatctatagaaacgtattctatgaatttataaaatgcttttacgtgtcctatcgtaggcgatagaaccgctaaaaagcctattgaatttctacaaaagaatctattatatggtatagggagagtataaaacattaaatgcccgtacttattaaagtattcagtagccaatcctaactctttcgaatacttattaatggctcttgttctgtacgaatctatttttttgaacaacggacctagtggtatatcttgttctatgtatctaaaataatgtctgactagatccgttagtttaatatcctcagtcatcttgtctagaatggcaaatctaactgcgggtttaggctttagtttagtttttatatctacatctatgtctttatctaacaccaaaaatataatagctaatattttattacaatcatccggatattcttctacgatctcactaactaatgtttctttggttatactagtatagtcacgattagacaaataaagaaaatcagatgatcgatgaataatacatttaaattcatcatctgtaagatttttgagatgtctcattaaaatattattagggtcagtactcattatcattaggcagctattacttattttatttttcaccatatagatcaatcattagatcatcaaaatatgtttcaatcatcctaaagagtatggtgaatgactcttcccatctaatttctgaacgttcaccaatgtctctagccactttggcactaatagcgatcattcgcttagcgtcttctatattattaactggttgattcaatctatctagcaatggaccgtcggacagcgtcattctcatgttcttaatcaatgtacatacatcgccgtcatctaccaattcatccaacaacataagctttttaaaatcatcattataataggtttgatcgttgtcatttctccaaagaatatatctaataagtagagtcctcatgattagtaatttaactattttagttaacaactattttttatgttaaatcaattagtacaccgatatgtttaatacttattcatattttagtttttaggattgagaatcaatacaaaaaattaatgcatcattaattttagaaatacttagtttccacgtagttaatgaaacatttgaactcatcgtacaggacgttctcgtacaggacgtaactataaaccggtttatatttgttcaagatagatacaaatccgataactttttttacgaattctacgggatccactttaaaagtgtcataccgggttctttttatttttttaaacagatcaatggtgtgatgttgattaggtcttttacgaatttgatatagaatagcgtttacatatcctccataatggtcaatcgccatttgttcgtatgtcataaattctttaattatatgacactgtgtattatttagttcatccttgttcatcattaggaatctatccaatatggcaattatactagaactataggtgcgttgtatacacatattgatgtgtctgtttatacaatcaatgatatttggatccatgctactaccttcgggtaaaattgtagcatcatataccatttctagtactttaggttcattattatccattgcagaggacgtcatgatcgaatcataaaaaaatatattatttttatgttattttgttaaaaataatcatcgaatacttcgtaagatactccttcatgaacataatcagttacaaaacgtttatatgaagtaaagtatctacgatttttacaaaagttaggatgcataagtacaaagtacgcgataaacggaataataatatatttatctagtttatctttttttatcgcgttcatagttagatacatagtctcagaagtaggattatgtaacatcagcttcgataaaatgacggttatttagttttacacattcgctcatacatgtatgaccgttaactacagagtctacactaaaatgattgaacaatagatagtctaccattgtttcgtattcagatagtacagcgtagtacatagcatcttcacaaattatatcaatgtctaatagatatttgacgcattttatggatcccacttcaacagccatcttaaaatcggtaaaatcatattgctttcctttatcattaataatttctaaaacatcatctctatcataaaagatacaaatattaactgtttgatcagtaataacattgctagtcgatagcaatttgttaataagatgcgctgggctcaatgtcttaataagaagtgtaagaggactatctccgaatttgttttgtttattaacatctgttgatggaagtaaaagatctataatgtctacatacttgactgttttaaagcatacaatatggagaggtgtatttccatcatgatctggttttgagggactaattcctagtttcatcatccatgagattgtagaagcttttggattgtctgacataagatgtctatgaatatgatttttgccaaatttatccactatcctggcttcaaatccgatggacattatttttttaaacactctttctgaaggatctgtacacgccaacaacagaccacatccttcttcatcaacctagttgttaatcttggctccatactgtaccaataaatttattctctctatgacttcatcatctgttcccgagagataatatagaggcgttttatgctgtttatcacacgcgtttggatctgcgccgtgcgtcagcagcatcgcgactattctattattaattttagaagctatatgcaatggataatttccatcatccgtctcatttggagagtatcctctatgaagaagttcttcgacaaatcgttcatctagtcctttaattccacaatacgcatgtagaatgtgataattatttccagaaggttcgatagcttgtagcatattcctaaatacatctaaatttttactattatatttggaataaagagatagataatactcggccgacataatgttgtccattgtagtataaaaattaatatttctatttctatttctgtatatttgcaacaatttactctctataacaaatatcataacttagttcttttatgtcaagaaggcactggtttagttcatctataaatgtcacgccataactaccacgcatgctatactcagaattatgataaagatatttatccttggggtgtaggtaatggggattaatctttgttggatcagtctctaagttaacacatgtcacacatgatccatttatagttatatcacacgatgatgatttatgaattgattccggaagatcgctatcgtattttgtggttccacaattcatttccatacatgttattgtcacactaatattatgatgaactttatctagccgctgagtggtaaacaacagaacagatagtttattatctttaccaacaccctcagccgctgccacaaatctctgatccgtatccatgatggtcatgtttatttctagtccgtatccagtcaacactatgttagcatttctgtcgatatagctttcactcatatgacactcaccaataatagtagaattaatgtcataatttacaccaatagtgagttcggcggcaaagtaccaataccggtaatcttgtcgaggaggacatatagtattcttgtattctaccgaatacccgagagatgcgatacaaaagagcaagactaatttgtaaaccatcttactcaaaatatgtaacaatagtacgatgcaatgagtaagacaataggaaatctatcttatatacacataattattctatcaattttaccaattagttagtgtaatgttaacaaaaatgtgggagaatctaattagtttttctttacacaattgacgtacatgagtctgagttccttgtttttgctaattatttcatccaatttattattcttgacgatatcgagatcttttgtataggagtcagacttgtattcaacatgcttttctataatcatcttagttattttagcatcatccaatagtacattttccagattaacagagtagatattaatgtcgtatttgaacagagcctgtagcatctcaatgtctttattatctatagccaatttaatgtcgggaatgaagagaagggaattgttagtgttggtaaatgccatatagtcgagcaagagaatcatcatatccacgtgtccattttttatagtgatgtgaatacaactaaggagaatagccagatcaaaagtagatggtatctctgaaagaaagtaggaaacaatacttacatcattaagcatgacggcatgataaaatgaagttttccatccagttttcccatagaacatcagtctccaatttttcttaacaaacagtttcaccgtttgcatgttaccactatcaaccgcataatacaatgcggtgtttcctttgtcatcaaattgtgaatcatccattccactgaatagcaaaatctttactattttggtatcttctaatgtggctgcctgatgtaatggaaattcattctctagaagatttttcaatgctccagcgttcaacaacgtacatactagacgcacgttattatcagctattgcataatacaaggcactatgaccgttgatatccgccttaaatgcatctttgctagagagaaagcttttcagctgcttagacttccaagtattaattcgtgacagatccatgtctgaaacgagacgctaattagtgtatattttttcattttttataattttgtcatattgcaccagaattaataatatctctaatagatctgattagtagatacatggctatcgcaaaacaacatatacacatttaataaaaataatatttattaagaaaattcagatttcacgtacccatcaatataaataaaataatgattccttacaccgtacccatataaacaatattaaggagattccaccttacccataaacaatataaatccagtaatatcatgtctgatgatgaacacaaatggtgtattaaattccagttcttcaggagatgatctcgccgtagctaccatgatagtagatgcctctgctacagttccttgttcgtcaacatctatctttgcattctgaaacattttataaatatataatgggtccctagtcatatgtttaaacgacgcattatctggattaaacatactaggagccatcatttcggctatcgacttaatatccctcttattttcgatagaaaatttagggagtttaagattgtacactttattccctaattgaaacgaccaatagtctaattttgcagccgtaatagaatctgtgaaatgggtcatattatcacctattgccaggtacatactaatattagcatccttatacggaaggcgtaccatgtcatattctttgtcatcgattgtgattgtatttccttgcaatttagtaactacgttcatcatgggaaccgttttcgtaccgtacttattagtaaaactagcattgcgtgttttagtgatatcaaacggatattgccatatacctttaaaatatatagtattaatgattgcccatagagtattattgtcgagcatattagaatctactacattaaacataccggatctacgttctactatagaattaattttattaaccgcatctcgtctaaagtttaatctatataggccgaatctatgatattgttgataatacaacggtttaatgcacacagtattatctacgaaactttgataagttagatcagtgtacgtatatttagatgttttcagcttagctaatcctgatattaattctgtaaatgctggacccagatctctttttctcaaatccatagtcttcaataattctattctagtattacctgatgcaggcaatagcgacataaacatagaaaacgaataaccaaacggtgagaagacaatattatcatcttcattcccatcttgaatatttttatacgctactataccggcattggtaaatccttgcagacgataggtagacactgaacacgttaacgatagtatcaataacgcaatcatgattttatggtattaataattaaccttatttttatgttcggtataaaaattattgatgtctacacatccttttgtaattgacatctatatatccttttgtataatcaactctaatcactttaacttttacagttttccctaccagtttatccctatatttaacatatctatccatatgcatcttaacactctctgccaagatagcttcaaagtgaggatagtcaaaaagataaatatatagagcataatcattctcgtatactctgccctttattacatcacccgcattgggcaacgaataacaaaatgcaagcatcttgttaacgggctcgtaaattgggataaaaattatgtttttattgattttatatctattttattcaagagaatattcaggaatttctttttccggttgtatctcatcgcagtatatatcatttgtacattgtttcatattttttaatagtttacaccttttagtaggactagtatcgtacaattcatagctgtattttgaattccaatcacgcataaaaatatcttccaattgttgacgaagacctaatccatcatccggtgtaatattaatagatgctccacatgtatccgtaaagtaatttcctgtccaatttgaggtacctatataggccgttttatcggttaccatatatttggcatggtttaccctagaatacggaatgggaggatcagcatctggtacaataaatagctttacttctatatttatgtttttagattttagcatagcgatagatcttaaaaagtttctcatgataaacgaagatcgttgccagcaactaatcaatagcttaacggatacttgtctgtctatagcggatcttcttaattcatcttctatataaggccaaaacaaaattttacccgccttcgaataaataatagggataaagttcataacagatacataaacgaatttactcgcatttctaatacatgacaataaagcggttaaatcattggttctttccatagtacatagttgttgcggtgcagaagcaataaatacagagtgtggaacaccacttacggtaatactaagaggatgatctgtattataatacgacggataaaagtttttccaattatatggtagattgttaactccaagataccagtatacctcaaaaatttgagtgagatccgctgccaagttcctattattgaagatcgcaatacccaattccttgacctgagttagtgatctccaatccatgttagcgcttcctaaataaatatgtgtattatcagatatccaaaattttgtatgaagaactcctcctaggatatttgtaatatctatgtatcgtacttcaactccggccatttgtagtctttcaacatcctttaatggtttgttagatttattgacggctactctaactcgtactcctcttttgggtaattgtacaatcttgtttaatattatcgtgccgaaattcgtacccacttcatccgataaactccaataaaaagatgatatatctagtgtttttgtggtattggatagaatttccctccacatgttaaatgtagacaaatatactttatcaaattgcatacctataggaatagtctctgtaatcactgcgattgtattatccggattcattttatttgttaaaagaataatcctatatcacttcactctattaaaaatccaagtttctatttctttcatga

SEQ ID NO: 18 - DNA, 31946 bp, Horsepox virus
ttattcaagagaatattcaggaatttctttttccggttgtatctcatcgcagtatatatcatttgtacattgtttcatattttttaatagtttacaccttttagtaggactagtatcgtacaattcatagctgtattttgaattccaatcacgcataaaaatatcttccaattgttgacgaagacctaatccatcatccggtgtaatattaatagatgctccacatgtatccgtaaagtaatttcctgtccaatttgaggtacctatataggccgttttatcggttaccatatatttggcatggtttaccctagaatacggaatgggaggatcagcatctggtacaataaatagctttacttctatatttatgtttttagattttagcatagcgatagatcttaaaaagtttctcatgataaacgaagatcgttgccagcaactaatcaatagcttaacggatacttgtctgtctatagcggatcttcttaattcatcttctatataaggccaaaacaaaattttacccgccttcgaataaataatagggataaagttcataacagatacataaacgaatttactcgcatttctaatacatgacaataaagcggttaaatcattggttctttccatagtacatagttgttgcggtgcagaagcaataaatacagagtgtggaacaccacttacggtaatactaagaggatgatctgtattataatacgacggataaaagtttttccaattatatggtagattgttaactccaagataccagtatacctcaaaaatttgagtgagatccgctgccaagttcctattattgaagatcgcaatacccaattccttgacctgagttagtgatctccaatccatgttagcgcttcctaaataaatatgtgtattatcagatatccaaaattttgtatgaagaactcctcctaggatatttgtaatatctatgtatcgtacttcaactccggccatttgtagtctttcaacatcctttaatggtttgttagatttattgacggctactctaactcgtactcctcttttgggtaattgtacaatcttgtttaatattatcgtgccgaaattcgtacccacttcatccgataaactccaataaaaagatgatatatctagtgtttttgtggtattggatagaatttccctccacatgttaaatgtagacaaatatactttatcaaattgcatacctataggaatagtctctgtaatcactgcgattgtattatccggattcattttatttgttaaaagaataatcctatatcacttcactctattaaaaatccaagtttctatttctttcatgactgattttttaacttcatccgtttccttatgaagatgatgtttggcaccttcataaatttttatttctctattacaatttgcatgttgcatgaaataatatgcacctaaaacatcgctaatcttattgtttgttccctggagtatgagagtcggggggggggggtgttaatcttggaaattatttttctaaccttgttggtagcctttaagacctgactagcaaatccagccttaattttttcatgattgattaatgggtcgtattggtatttataaactttatccatatctctagatactgattctggacatagctttccgactggcgcatttggtgtgatggttcccataagtttggcagctagcagattcagttttgaaacagcatctgcattaactagaggagacattagaatcattgctgtaaacaagtttggattatcgtaagaggctagtatagaaactgttgctcccatggaatgacccaataagaagactggaactcctaaataagtagatttaatagttaccacgtgctgtaccacatctctaacatacgtaccaaagtcatcaatcatcattttttcaccattacttcttccatgtccaatatgatcatgtgagaatactaaaattcctaacgatgatatgttttcagctagttcgtcataacgtccagaatgtttaccagctccatgacttatgaatactaatgccttaggatatgtaataggtttccaatatttacaatatatgtaatcattgtccagattgaacatacagtttgcactcatgattcacgttatataactatcaatattaacagttcgtttgatgatcatattatttttatgttttattgataattgtaaaaacatacaattaaattaatatagaggaaggagacggctactgtcttttgtgagatagtcatggcgactaaattagattatgaggatgctgttttttactttgtggatgatgataaaatatgtagtcgcgactccatcatcgatctaatagatgaatatattacgtggagaaatcatgttatagtgtttaacaaagatattaccagttgtggaagactgtacaaggaattgatgaagttcgatgatgtcgctatacggtactatggtattgataaaattaatgagattgtcgaagctatgagcgaaggagaccactacatcaattttacaaaagtccatgatcaggaaagtttattcgctaccataggaatatgtgctaaaatcactgaacattggggatacaaaaagatttcagaatctagattccaatcattgggaaacattacagatctgatgaccgacgataatataaacatcttgatactttttctagaaaaaaaattgaattgatgatataggggtcttcataacgcataattattacgttagcattctatatccgtgttaaaaaaaattatcctatcatgtatttgagagttttatatgtagcaaacatgatagctgtgatgccaataagctttagatattcacgcgtgctagtgttagggatggtattatctggtggtgaaatgtccgttatataatctacaaaacaatcatcgcatatagtatgcgatagtagagtaaacatttttatagtttctactggattcatacatcgtctacccaattcggttataaatgaaattgtcgccaatcttacacccaaccccttgttatccattagtatagtattaacttcgttatttatgtcataaactgtaaatgattttgtagatgccatatcatacatgatattcatgtccctattataatcattactaactttatcacaatatatgttgataatatctatatatgatctagtctttgtgggcaactgtctatacaagtcgtctaaacgttgtttactcatatagtatcgaacagccatcattacatggtcccgttccgttgatagataatcgagtatgttagtagacttgtcaaatctatataccatattttctggaagtggatatacatagtcgtgatcaacattattgctagcctcatcttctatatcatgtactataccattatctatatcctctatatcctgtactataccattatctatatcctctatatcctctatatcctgtactataccattatctatatcctctatatcatctacataatctacgatattattacacataaacatcgacaacatactattgtttattatctaagtcctgttgatccaaacccttgatctcctctatctgtactatctagagattgtacttctttcagttctggataatatatacgttgatagattagctgagctattctatctccagtatttacattaaacgtacattttccattattaataagaatgactcctatgtttcccctataatcttcgtctattacaccacctcctatatcaatgccttttagtgacagaccagacctaggagctattctaccatagcaaatcttaggcatggacatactaatatctgtcttaattaactgtctttctcctggagggatagtataatcgtaagcgctatacaaatcatatccggcagcacccggcgattgcctagtaggagatttagctctgttagtttccttaacaaatctaactggtgagttaatattcatgttgaacataaaactaatattttatttcaaaattatttaccatcccatatattccatgaataagtgtgatgattgtacacttctatagtatctatatacgattcacgataaaatcctcctatcaatagcagtttattatccactatgatcaattctggattatccctcggataaataggatcatctatcagagtccatgtattgctggattcacaataaaattccgcatttctaccaaccaagaataaccttctaccgaacactaacgcgcatgatttataatgaggataataagtggatggtccaaactgccactgatcatgattgggtagcaaatattctgtagttgtatcagtttcagaatgtcctcccattacgtatataacattgtttatagatgccactgctggattacatctaggtttcagaagactcggcatattaacccaagcagcatccccgtggaaccaacgctcaacagatgtgggatttggtagacctcctactacgtataatttattgttagcgggtatcccgctagcatacagtctggggctattcatcggaggaattggaatccaattgtttgatatataatttacagctatagcattgttatgtatttcattgttcatccatccaccgatgagatatactacttctccaacatgagtacttgtacacatatggaatatatctataatttgatccatgttcataggatactctatgaatggatacttgtatgatttgcgtggttgtttatcacaatgaaatattttggtacagtctagtatccattttacattatttatacctctgggagaaagataatttgacctgattacatttttgataaggagtagcagatttcctaatctatttcttcgctttatataccacttaatgacaaaatcaactacataatcctcatctggaacatttagttcatcgctttctagaataagtttcatagatagataatcaaaattgtctatgatgtcatcttccagttccaaaaagtgtttggcaataaagtttttagtatgacataagagattggatagtccgtattctatacccatcatgtaacactcgacacaatattcctttctaaaatctcgtaagataaagtttatacaagtgtagatgataaattctacagaggttaatatagaagcacgtaataaattgacgacgttatgactatctatatatacctttccagtatacgagtaaataactatagaagttaaactgtgaatgtcaaggtctagacaaaccctcgtaactggatctttatttttcgtgtatttttgacgtaaatgtgtgcgaaagtaaggagataactttttcaatatcgtagaattgactattatattgccacctatagcatcaataattgttttgaatttcttagtcatagacaatgctaatatattcttacagtacacagtattaacaaatatcggcatttatgtttctttaaaagtcaacatctagagaaaaatgattatcttcttgagacataactcccattttttggtattcacccacacgtttttcgaaaaaattagtttttccttccaatgatatattttccatgaaatcaaacggattggtaacattataaatttttttaaatcccaattcagaaatcaatctatccgcgacaaattctatatatgttttcatcatttcacaattcattcctataagtttaactggaagagccgcagtaagaaattcttgttcaatggatactgcatctgttataatagatctaacggtttcttcactcggtggatacaataaatgtttaaacatcaaacatgcgaagtcgcagtgtagaccctcgtctctactaattagttcgttggaaaacgtgagtccgggcattaggccacgctttttaagccaaaatatggaagcgaatgatccagaaaagaaaattccttctactgcagcaaaggcaataagtctctctccataaccggcgctgtcatgtatccacttttgagcccaatcggccttcttttttacacaaggcatcgtttctatggcattaaagagatagtttttttcattactatctttaacataagtatcgatcaaaagactatacatttccgaatgaatgttttcaatggccatctgaaatccgtagaaacatctagcctcggtaatctgtacttctgtacaaaatcgttccgccaaattttcattcactattccgtcactggctgcaaaaaacgccaatacatgttttataaaatatttttcgtctggtgttagtttattccaatcattgatatctttagatatatctacttcttccactgtccaaaatgatgcctctgcctttttatacatgttccagatgtcatgatattggattgggaaaataacaaatctatttggatttggtgcaaggatgggttccataactaaattaacaatatcaataaattttttttcagttatctatatgcctgtacttggattttttgtacatcgatatcgccgcaatcactacaataattacaagtattattgatagcattgttattagtactatcataattaaattatcgacattcatgggtgctgaataatcgttattatcatcattatcattttgtaattgtgacatcatactaaataaatcgtttgcgagattgttgtgggaagcgggcatggaggatgcattatcattattatttaacgccttccatttggattcacaaatgttacgcacattcaacattttatggaaactataattttgtgaaaacagataacaagaaaactcgttatcgttcaaatttttaacgatagtaaaccgattaaacgtcgagctaatttctaacgctagcgactctgttggatatgggtttccagatatatatcttttcagttcccctacgtatctataatcatctgtaggaaatggaagatatttccatttatctactgttcctaatatcatatgtggtggtgtagtaaaaccattaagcgcgaaagatgttattttgcatcgtattttaacttcgcaataatttctggttagataacgcactctaccagtcaagtcaatgatattagcctttacagatatattcatagtagtcgtaacgatgactccatcttttagatgcgatactcctttgtatgtaccagaatcttcgtaccgcaaactcgatatatttaaacaagttaatgagatattaacgcgttttatgaatgatgatatataaccagaagttttatcctcggtggctagcgctataaccttatcattataataccaactagtgtaattaatatgtgacacgttagtgtgggtacaaatatgtacattatcgtctacgtcgtattcgatacatccgcatacagccaacaaatataaaatgacaaatactctaacgccgttcgtacccatcttgatgcggtttaataaatgttttgatttcaatttattgtaaaaaaagattcggttttatactgttcgatattctcattgcttatattttcatctatcatctccacacagtcaaatccgtggttagcatgcacctcatcaaccggtaaaagactatcggactcttctatcattataactctagaatatttaatttggtcattattaatcaagtcaattatcttatttttaacaaacgtgagtattttactcattttttataaaaacttttagaaatatacagactctatcgtgtgtctatatcttctttttatatccaatgtatttatgtctgatttttcttcatttatcatatataatggtccaaattctacacgtgcttcggattcatccagatcattaaggttcttataattgtaacatccttctcttccctcttctacatcttccttcttatttttattcttattcttattcttagcgtcacagaatctaccacagcaggatcccatgacgagcgtcatattaaactaattcattttcaattataatatatgattagtaatgaccattaaaataaaaaatattcttcataaccggcaagaaagtgaaaagttcacattgaaactatgtcagtagtatacatcatgaaatgagatgaaatgatgatatatatatatatatactctattttggtggaggattatatgatataattcgtggataatcattcttaagacacatttctttattcgtaaatcttttcacgttaaatgagtgtccatattttgcaatttcttcatatgatggcggtgtacgtggacgaagctgctcctgttcttgttgtagtcgccgactgtcgtgtctgcgtttagatccctccattatcgcgattgcgtagatggagtactattttataccttgtaattaaatttttttattaattaaacgtataaaaacgttccgtatctgtatttaagagccagatttcgtctaatagaacaaatagctacagtaaaaataactagaataattgctacacccactagaaaccacggatcgtaatacggcaatcggttttcgataataggtggaacgtatattttatttaaggacttaacaattgtctgtaaaccacaatttgcttccgcggatcctgtattaactatctgtaaaagcatatgttgaccgggcggagccgaacattttccgatatccaatttctgtatatctataatattattaacctccgcatacgcattacagttcttttctagcttggataccgcactaggtacatcgtctagatctattcctatttcctcagcgatagctcttctatccttttccggaagcaatgaaatcacttcaataaatgattcaaccatgagtgtgaaactaagtcgagaattactcatgcatttgttagttattcggagcgcgcaatttttaaactgtcctataacctctcctatatgaatagcacaagtgacattagtagggatagaatgttgagctaatttttgtaaataactatctataaaaagattatacaaagttttaaactctttagtttccgccatttatccagtctgagaaaatgtctctcataataaatttttccaagaaactaattgggtgaagaatggaaacctttaatctatatttatcacagtctgtcttggtacacatgatgaattcttctaatgctgtactaaattcgatatctttttcgatttctggatatgtttttaataaagtatgaacaaagaaatgaaaatcgtaataccagttatgtttaactttgaaattgttttttattttcttgttaatgattccagccacttgggaaaagtcaaagtcgtttaatgccgatttaatacgttcattaaaaacaaactttttatcctttagatgaattattattggttcattggaatcaaaaagtaagatattatcgggtttaagatctgcgtgtaaaaagttgtcgcagcatggtagttcgtaaattttaatgtataacagagccatctgtaaaaagataaactttatgtattgtaccaaagatttaaatcctaatttgatagctaactcggtatctactttatctgcagaatacagtgctaggggaaaaattataatatttcctctttcgtattcgtagttagttctcttttcatgttcgaaaaagtgaaacatgcggttaaaatagtttataacattaatattactgttaataactgccggataaaagtgggatagtaatttcacaaatttgatactgtcctttctctcgttaaacgcctttaaaaaaactttagaagaatatctcaatgagagttcctgaccatccatagtttgtatcaataatagcaacatatgaagaacccgtttatacagagtatgtaaaaatgttaatttatagtttaatcccatggcccacgcacacacgattaattttttttcatctccctttagattgttgtatagaaatttgggtactgtgaactccgccgtagtttccatgggactatataattttgtggcctcgaatacaaattttactacatagttatctatcttaaagactataccatatcctcctgtagatatgtgataaaaatcgtcgtttataggataaaatcgtttatccttttgttggaaaaaggatgaattaatgtaatcattctcttctatctttagtagtgtttccttattaaaattcttaaaataatttaacaatctaactgacggagcccaattttggtgtaaatctaattgggacattatgttgttaaaatataaacagtctcctaatataacagtatctgataatctatggggagacatccattgatattcaggggatgaatcattggcaacacccatttattgtacaaaaagccccaatttacaaacgaaagtccaggtttgatagagacaaactattaactattttgtctctgtttttaacacctccacagtttttaatttctttagtaatgaaattattcacaatatcagtatcttctttatctaccagagattttactaacttgataaccttggctgtctcattcaatagggtagtgatatttgtatgtgtgatattgatatctttttgaattgtttcttttagaagtgattctttgatggtgtcagcatacgaattacaataatgcagaaactcagttaacatgcaggaattatagtaagccaattccaattgttgcctgtattgtattagagtattaatatgcgcaatggtgtccttgcgtttctctgatagaatgcgagcagcgattttggcgttatcatttgacgatatttctggaatgacgaatcctgtttctactaactttttggtaggacaaagtgaaacaatcaagaagatagcttctcctcctatttgtggaagaaattgaactcctctagatgatctactgacgatagtatctccttgacagatattggaccgaattacagaagtacctggaatgtaaagccctgaaaccccctcattttttaagcagattgttgccgtaaatcctgcactatgcccaagatagagagctcctttggtgaatccatctctatgtttcagtttaaccaagaaacagtcagctggtctaaaatttccatctctatctaatacagcatctaacttgatgtcaggaactatgaccggtttaatgttatatgtaacattgagtaaatccttaagttcataatcatcactgtcatcagttatgtacgatccaaacaatgtttctactggcatagtggatacgaagatgctatccatcagaatgtttccctgattagtattttctatatagctattcttctttaaacgattttccaaatcagtaactatgttcatttttttaggagtaggacgcctagccagtatggaagaggattttctagatcctctcttcaacatctttgatctcaatggaatgcaaaaccccatagtgaaacaaccaacgatgtaacaaccaacgataaaaataatattgtttttcactttttataattttaccatctgactcatggattcattaatatctttataagagctactaacgtataattctttataactgaactgagatatatacaccggatctatggtttccataattgagtaaatgaatgctcggcaataactaatggcaaatgtatagaacaacgaaattatactagagttgttaaagttaatattttctatgagctgttccaataaattatttgttgtaactgcgttcaagtcataaatcatcttgatactatccagtaaaccgtttttaagttctggaatattatcatcccattgtaaagcccctaattcgactatcgaatatcctgctctgatagcagtttcaatatcgacggacgtcaatactgtaataaaggtggtagtattgtcatcatcgtgataaactactggaatatggtcgttagtaggtacggtaactttacacaacgcgatatataactttccttttgtaccatttttaacgtagttgggacgtcctgcagggtattgttttgaagaaatgatatcgagaacagatttgatacgatatttgttggattcctgattatttactataatataatctagacagatagatgattcgataaatagaaaaggtatatcgttggtaggataatacatccccattccagtattctcggatactctattaatgacactagttaagaacatgtcttctattctagaaaacgaaaacatcctacatggactcattaaaacttctaacgctcctgattgtgtctcgaatgcctcgtacaaggatttcaaggatgccatagattctttgaccaacgatttagaattgcgtttagcatctgatttttttattaaatcgaatggtcggctctctggtttgctaccccaatgataacaatagtcttgtaaagataaaccgcaagaaaatttatacgcatccatccaaataaccctagcaccatcggatgatattaatgtattattatagattttccatccacaattattgggccagtatactgttagcaacggtatatcgaatagattactcatgtaacctactagaatgatagttcgtgtactagtcataatatctttaatccaatctaagaaatttaaaattagattttttacactgttaaagttaacaaaggtattacccggatacgtggatatcatatatggcattggtccattatcagtaatagctccataaactgatacggcgatggtttttatatgtgtttgatctaacgaggaagaaattcgcgcccacaattcatctctagatatgtatttaatatcaaacggtaacacatcaatttcgggacgcgtatatgtttctaaatttttaatccaaatataatgatgacctatatgccctattatcatactgtcaactatagtacacctagagaacttacgatacatctgtttcctataatcgttaaattttacaaatctataacatgctaaaccttttgacgacaaccattcattaatttctgatatggaatctgtattctcgataccgtattgttctaaagccagtgctatatctccctgttcgtgggaacgctttcgtataatatcgatcaacggataatctgaagtttttggagaataatatgactcatgatctatttcgtccataaacaatctagacataggaattggaggcgatgatcttaattttgtgcaatgagtcgtcaatcctataacttctaatcttgtaatattcatcatcgacataatactatctatgttatcatcgtatattagtataccatgaccttcttcatttcgtgccaaaatgatatacagtcttaaatagttacgcaatatctcaatagtttcataattgttagctgttttcatcaagatttgtaccctgtttaacatgatggcgttctatacgtttctattttctattttttaaatttttaacgatttactgtggctagatacccaatctctctcaaatatttttttagcctcgcttacaagctgtttatctatactattaaaactgacgaatccgtgattttggtaatgggttccgtcgaaatttgccgaagtgatatgaacatattcgtcgtcgactatcaacaattttgtattattctgaatagtgaaaaccttcacagatagatcattttgaacacacaacgcatctagacttttggcggttgccatagaatatacgtcgttcttatcccaattaccaactagaagtctgatcttaactcctctattaatggctgcttctataatggagttgtaaatgtcgggccaatagtagctattaccgtcgacacgtgtagtgggaactatggccaaatgttcaatatctatactagtcttagctgacctgagtttatcaataactacatcggtatctagatctctagaatatcccaataggtgttccggagaatcagtaaagaacactccacctataggattcttaatatgatacgcagtgctaactggcaaacaacaagccgcagagcataaattcaaccatgaattttttgcgctattaaaggctttaaaagtatcaaatcttctacgaagatctgttgccagcgggggataatcagaatatacacctaacgttttaatcgtatgtatagatcctccagtaaatgacgcgtttcctacataacatctttcatcatctgacacccaaaaacaaccgagtagtagtcccacattattttttttatctatattaacggttataaaatttatatccgggcagtgactttgtagctctcccagatttcttttccctcgttcatctagcaaaactattattttaatccctttttcagatgcctcttttagtttatcaaaaataagcgctcccctagtcgtactcagaggattacaacaaaaagatgctatgtatatatatttcttagctagagtgataatttcgttaaaacattcaaatgttgttaaatgatcggatctaaaatccatattttctggtagtgtttctaccagcctacattttgctcccgcaggtaccgatgcaaatggccacatttagttaacataaaaacttatacatcctgttctatcaacgattctagaatatcatcggctatatcgctaaaattttcatcaaagtcgacatcacaacctaactcagtcaatatattaagaagttccatgatgtcatcttcgtttatttctatatccgtatccattgtagattgttgaccgattatcgagtttaaatcattactaatactcaatccttcagaatacaatctgtatttcattgtaaatttataggcggtgtatttaagttggtagattttcaattatgtattaatatagcaacagtagtttttgctcctccttgattctagcatcctcttcattattttcttctacgtacataagcatgtccaatacgttagacaacacaccaacgatggcggccgccacagacacgaatatgactaaaccgatgaccatttaaaaacccctctctagctttcacttaaactgtatcgattattcttttagaacatgtataatataaaaacattattctatttcgaatttaggcttccaaaaatttttcatccgtaaaccgataataatatatatagacttgttaatagtcggaataaatagattaatgcttaaactatcatcatctccacgattagagatacaatatttacattttttttgctgtttcgaaactttatcaatacacgttaatacaaacccaggaaggagatattgaaactgaggctgttgaaaatgaaacggtgaatacaataattcagataatgtaaaatcatgattccgtattctgatgatattagaactgctaatggatgtcgatggtatgtatctaggagtatctattttaacaaagcatcgatttgctaatatacaattatccttttgattaattgttattttattcatattcttaaaaggtttcatatttatcaattcttctacattaaaaatttccatttttaatttatgtagccccgcaatactcctcattacgtttcattttttgtctataatatccattttgttcatctcggtacatagattatccaattgagaagcgcatttagtagttttgtacattttaagtttattgacaaatcgtcgaaaactagttatagttaacattttattatttgataccctgatattaatacccctgccgttactattatttataactgatgtaatccacgtaacattggaattaactatcgatagtaatgcatcgacgcttccaaaattgtctattataaactcaccgataatttttttattacatgttttcatattcattaggattatcaaatctttaatcttactacgattgtatgcgttgatattgcaagacgtcattctaaaagacggaggatctccatcaaatgccaaacaatcacgtacaaagtacatggaaataggttttgttctattgcgcatcatagatttatatagaacacccgtagaaatactaatttgttttactctataaaatactaatgcatctatttcatcgttttgtataacgtctttccaagtgtcaaattccaaatttttttcattgatagtaccaaattcttctatctctttaactacttgcatagataggtaattacagtgatgcctacatgccgttttttgaaactgaatagatgcgtctagaagcgatgctacgctagttacaatcaccactttcatatttagaatatatatatgtaaaaatatagtagaatttcattttgtttttttctatgctataaatgaattctcattttgcatctgctcatactccgttttatattaataccaaagaaggaaaatatttggttctaaaagccgttaaagtatgcgatgttagaactgtagaatgtgaaggaagtaaagcttcctgcgtactcaaagtagataaaccctcatcacccgcgtgtgagagaagaccttcgtccccttccagatgcgagagaatgaataacccaggaaaacaagttccgtttatgaggacggacatgctacaaaatatgttcgcggctaatcgcgataatgtagcttctagacttttgtcctaaaatactattatatccttttcgatattaataaatccgtgtcgtccaggttttttatctctttcagtatgtgaatagataggtattttatctctattcatcatcgaatttaagagatccgataaacattgtttgtattctccagatgtcagcatctgatacaacaatatatgtgcacataaacctctggcacttatttcatgtaccttccccttatcactaaggagaatagtatttgagaaatatgtatacatgatattatcatgaattagatatacagaatttgtaacactctcgaaatcacacgatgtgtcggcgttaagatctaatatatcactcgataacacattttcatctagatacactagacattttttaaagctaaaatagtctttagtagtgacagtaactatgcgattattttcatcgatgatacatttcatcggcatattattacgcttaccatcaaagactataccatgtgtatatctaacgtattctagcatggttgccatacgcgcattaaacttttcaggatctttggatagatcttccaatctatctatttgagaaaacatttttatcatgttcaatagttgaaacgtcggatccactatatagatattatctataaagattttaggaactacgttcatggtatcctggcgaatattaaaactatcaatgatatgattatcgttttcatcttttatcaccatatagtttctaagatatgggattttacttaatataatattatttcccgtgataaattttattagaaaggccaaatctataagaaaagtcctagaattagtctgaagaatatctatatcgccgtatagtatatttggattaattagatatagagaatatgatccgtaacatatacaacttttattatggcgtctaagatattcttccatcaacttattaacatttttgactagggaagatacattatgacgtcccattacttttgccttgtctattattgcgacgttcatagaatttagcatatctcttgccaattcttccattgatgttacattataagaaattttagatgaaattacatttggagctttaatagtaagaactcctaatatgtccgtgtatgtggtcactaatacagattgtagttctataatcgtaaataatttacctatattatatgtttgagtctgtttagaaaagtagctaagtatacgatcttttatttctgatgcagatgtattaacatcggaaaaaaatctttttttattcttttttactaaagatacaaatatgtctttgttaaaaacagttattttttgaatatttctagcttgtaattttaacatatgatattcgttcacactaggtactctgcttaaataggtttctataatctttaatgtaatattaggaaaagtattctgatcaggattcctattcattttgaggatttaaaactctgattattgtctaatatggtctctacgcaaactttttcacagagcgatagagtttttgataactcgtttttcttaagaaatataaaactactgtctccagagctcgctctatcttttattttatttaattcgatacaaactcctgatactggttcagaaagtaattcattaattttcagtcctttatagaagatatttaatatagataatacaaaatcttcagtttttgatatcgatctgattgatcctagaactagatatattaataacgtgctcattaggcagtttatggcagcttgataattagatatagtatattccagttcatatttattagataccgcattgcccagattttgatattctatgaattcctctgaaaataaatccaaaataactagacattctattttttgtggattagtgtactctcttccctctatcatgttcactactggtgtccacgatgataaatatctagagggaatataatatagtccataggatgccaatctagcaatgtcgaataactgtaattttattcttcgctcttcattatgaattgattcttgaggtataaacctaacacaaattatattattagacttttcgtatgtaatgtctttcatgttataagtttttaatcctggaatagaatctattttaatgaggcttttaaacgcagagttctccaacgagtcaaaacataatactctgttggttttcttatatacaatattacgattttcttctttgaatggaataggtttttgaattagtttataattacaacataatagataaggaagtgtgcaaatagtacgcggaaaaaacataatagctcccctgtttttatccatggttttaagtaaatgatcactggcttctttagttaatggatattcgaacattaaccgtttcatcatcattggacagaatccatattttttaatgtaaagagtgatcaaatcattgtgtttattgtaccatcttgttgtaaatgtgtattcggttatcggatctgctcctttttctattaaagtatcgatatcgatctcgtctaagaattcaactatatcgacatatttcatttgtatacacataaccattactaacgtagaatgtataggaagagatgtaacgggaacagggtttgttgattcgcaaactattctaatacataattcttctgttaatacgtcttgcacgtaatctattatagatgccaagatatctatataattattttgtaagatgatgttaactatgtgatctatataagtagtgtaataattcatgtattttgatatatgttccaactctgtctttgtgatgtctagtttcgtaatatctatagcatcctcaaaaaatatattcgcatatattcccaagtcttcagttttatcttctaaaaaatcttcaacgtatggaatataataatctattttacctcttctgatatcattaatgatataatttttgacactatcttctgtcaattgattcttattcactatatctaagaaacggatagcgtccctaggacgaactacttccattaatatctctattatagcttctggacataattcatctattataccagaattaatgggaactattccgtatctatctaacatagttttaagaaagtcagaatctaagacttgatgttcatatattggttcatacatgaaatgatttctattgatgatagtgactatttcgttctctgaaaattggtaactcattttatatatgctttccttgttgatgaaggataggatatactcaatagaatttgtaccaacaaactgttctcttatgaatcgtatatcatcatctgaaataatcatgtaaggcatacatttaacaattagagacttgtctcctgttatcaatatactattcttgtgataatttatgtgtgaggcaaatttgtccacgttctttaattttgttatagtagatatcaaatccaatggagctacagttcttggcttaaacagatatagtttttctggaacaaattctacaacattattataaaggactttgggtagataagtgggatgaaatcctattttaattaatgctatcgcattgtcctcgtgcaaatatccaaacgcttttgtgatagtatgacattcattatctagaaacgctctacgaatatctgtcacagatatcatctttagagaatactagttgcgttaatagtactaaaatttgtattttttttaatatatctcaaaaaaaattaatatttatggatccgatgtataattagaatcagaatctaatgatgacgtacccaagaagtttatctacagccaatttagctgcattatttttagcatctcgtttagattttccatcggccttatcgaatactcttccgtcgatatctacacaggcataaaatgtaggagagttactaggcccaactgattcaatacgaaaagaccaatctctcttagttatttggcagtactcattaataatggtgacagggttagcatctttccaatcaataatttttttagccggaataacatcatcaaaagacttatgatcctctctcattgatttttcgcgggatacatcatctattatgacgtcagccatagcatcagcatccggcttatccgcctccgttgtcataaaccaacgaggaggaatatcgtcggagctgtacaccatagcactacgttgaagatcgtacagagctttattaacttctcgcttctccatattaagttgtctagttagttgtgcagcagtagctccttcgattccaatggttttaatagcctcacacacaatctctgcgttagaacgttcgttgatatagattttagacattttagagagaactaacgcaatcagtaataaaactaatttattttatcattttttttattcatcatcctctggtggttcgtcgtttctatcgaatgtagctctgattaacccgtcatctataggtgatgctggttctggagattctggaggagatggattattatctggaagaatctctgttatttccttgttttcatgtatcgattgcgttgtaacattaagattgcgaaatgctctaaatttgggaggcttaaagtgttgtttgcaatctctacacgcgtgtctaactagtggaggttcgtcagctgctctagtttgaatcatcatcggtgtagtattcctacttttacagttaggacacggtgtattgtatttctcgtcaagaacgttaaaataatcgttgtaacttacatcctttattttatctatattgtattctactcctttcttaatgcattttataccgaataagagatagcgaaggaattctttttcggtgccgctagtacccttaatcatatcacatagtgttttatattccaaatttgtggcaatagacggtttatttctatacgatagtttgtttttggaatcctttgagtattctataccaatattattctttgattcgaatttagtttcttcgatattagattttgtattacctatattcttgatgtagtactttgatgatttttccatggcccattctattaagtcttccaagttggcatcatccacatattgtgatagtaattctcggatatcagtagcggttaccgccattgatgtttgttcattggatgagtaactactaatgtatacattttccatttataacacttatgtattaactttgttcatttatattttttcattattatgttgatattaacaaaagtgaatatatatgttaataattgtattgtggttatacggctacaattttataatgagtgaaagtcagtgtccgatgatcaatgacgatagctttactctgaaaagaaagtatcaaatcgatagtgcggagtcaacaataaaaatggataagaagaggataaagtttcagaatagagccaaaatggtaaaagaaataaatcagacaataagagcagcacaaactcattacgagacattgaaactaggatacataaaatttaagagaatgattatgactactactctagaagatatagcaccatctattccaaataatcagaaaacttataaactattctcggacatttcagccatcggcaaagcatcacggaatccaagtaagatggtatatgctctgctgctttacatgtttcccaatttgtttggagatgaccatagattcattcgttatagaatgcatccaatgagtaaaatcaaacacaagatcttctctcctttcaaacttaatcttattagaatattagtggaagaaagattctataataatgaatgcagatctaataaatggagaataattggaacacaagttgataaaatgttgatagctgaatctgataattatacaatagatgcaaggtataacctaaaacccatgtatagaatcaagggagaatctgaagaagataccctctttatcaaacagatggtagaacaatgtgtgacatcccaggaattggtggaaaaagtgttgaagatactgtttagagatttgttcaagagtggagaatacaaagcgtacagatacgatgatgatgtagaaaatggatttattggattggatacactaaaattaaacattgttcatgatatagttgaaccatgtatgcctgttcgtaggccagtggctaagatactgtgtaaagaaatggtaaataaatactttgagaatccgctacatattattggtaaaaatcttcaagagtgcattgactttgttagtgaataggcatttcatctttctccaatactaattcaaattgttaaattaataatggatagtataaatagttattagtgataaaatagtaaaaataattattagaataagagtgtagtatcatagataactctcttctataaaaatggattttattcgtagaaagtatcttatatacacagtagaaaataatatagattttttaaaggatgatacattaagtaaagtaaacaattttaccctcaatcatgtactagctctcaagtatctagttagcaattttcctcaacatgttattactaaggatgtattagctaataccaatttttttgttttcatacatatggtacgatgttgtaaagtgtacgaagcggttttacgacacgcatttgatgcacccacgttgtacgttaaagcattgactaagaattatttatcgtttagtaacacaatacaatcgtacaaggaaaccgtgcataaactaacacaagatgaaaaatttttagaggttgccaaatacatggacgaattaggagaacttataggcgtaaattatgacttagttcttaatccattatttcacggaggggaacccatcaaagatatggaaatcatttttttaaaactgtttaagaaaacagacttcaaagttgttaaaaaattaagtgttataagattacttatttgggcatacctaagcaagaaagatacaggcatagagtttgcggataatgatagacaagatatatatactctatttcaacaaactggtagaatcgtccatagcaatctaacagaaacgtttagagattatatctttcccggagataagactagctattgggtgtggttaaacgaaagtatagctaatgatgcggatatcgttcttaatagacacgccattaccatgtatgataaaattcttagttatatatactctgagataaaacaaggacgcgttaataaaaacatgcttaagttagtttatatctttgagcctgaaaaagatatcagagaacttctgctagaaatcatatatgatattcctggagatatcctatctattattgatgcaaaaaacgacgattggaaaaaatattttattagtttttataaagctaattttattaacggtaatacatttattagtgataaaacgtttaacgaggacttattcagagttgttgttcaaataaatcccgaatatttcgataatgaacgaattatgtctttattctctacgagtgctgcggacattaaacgatttgatgagttagatattaataacagttatatatctaatataatttatgaggtgaacgatatcacattagatacaatggatgatatgaagaagtgtcaaatctttaacgaggatacgttgtattatgttaaggaatacaatacatacctgtttttgcacgagtcggatcccatggtcatagagaacggaatactaaagaaactgtcatctataaaatccaagagtagacggctgaacttgtttagcaaaaacattttaaaatattatttagacggacaattggctcgtctaggtcttgtgttagataattataaaggagacttgttagttaaaatgataaaccatcttaagtctgtggaggatgtatccgcattcgttcgattttctacagataaaaaccctagtattcttccatcgctaatcaaaactattttagctagttataatatttccatcatcgtcttatttcaaaggtttttgagagataatctatatcatgtagaagaattcttggataaaagcatccatctaaccaagacggataagaaatatatacttcaattgataagacacggtagatcatagaacagaccaaatatattattaataatttgtatatacatagatataattatcacatattaaaaattcacacatttttgataaatgggaactgctgcaacaattcagactcccaccaaattaatgaataaagaaaatgcagaaatgattttggaaaaaattgttgatcatatagttatgtatattagtgacgaatcaagtgattcagaaaataatcctgaatatattgattttcgtaacagatacgaagactatagatctctcattataaaaagtgatcacgagtttgtaaagctatgtaaaaatcatgcggagaaaagttctccagaaacgcaacaaatgattatcaaacacatatacgaacaatatcttattccagtatctgaagtactattaaaacctataatgtccatgggtgacataattacatataacggatgtaaagacaatgaatggatgctagaacaactctctaccctaaactttaacaatctccgcacatggaactcatgtagcataggcaatgtaacgcgtctgttttatacattttttagttatctgatgaaagataaactaaatatataagtataatcccattctaatactttaacctgatgtattagcatcttattagaatattaacctaactaaaagacataacataaaaactcattacatagttgataaaaagcggtaggatataaatattatggctgccaccgttccgcgttttgacgacgtgtacaaaaatgcacaaagaagaattctagatcaagaaacattttttagtagaggtctaagtagaccgttaatgaaaaacacatatctatttgataattacgcgtatggatggataccagaaactgcaatttggagtagtagatacgcaaacttagatgcaagtgactattatcccatttcgttgggattacttaaaaagttcgagtttctcatgtctctatataaaggtcctattccagtatacgaagaaaaagtaaatactgaattcatagccaatggatcgttctctggtagatacgtatcatatcttcgaaagttttctgctcttccaacaaacgagtttattagttttttgttactgacttccattccaatctataatatcttgttctggtttaaaaatactcagtttgatattactaaacacacattattcagatacgtctatacagataatgccaaacacctggcgttggctaggtatatgcatcaaacaggagactataagcctttgtttagtcgtctcaaagagaattatatatttaccggtcccgttccaataggtatcaaagatatagatcaccctaatcttagtagagcaagaagtccatccgattatgagacattagctaatattagtactatattgtactttaccaagtatgatccggtattaatgtttttattgttttacgtacctgggtattcaattactacaaaaattactccagcagtagagtatctaatggataaactgaaactaacaaagagcgatgtacaactgttgtgaatattttatgcttcgtaaaatgtaggttttgaaccaaacattctttcaaagaatgagatacataaaactttattatccaataaattgactatttcggatgtcaatcgtttaaagtaaacttcgtaaaatattctttgatcactgccgagtttaaaacttctatcgataattgtctcatatgttttaatatttacaagttttttggtccatggtacattagccggacaaatatatgcaaaataatatcgttctccaagttctatagtttctggattatttttattatattcagtaaccaaatacatattagggttatctgcggatttataatttgagtgatgcattcgactcaacataaataattctagaggagacgatctactatcaaattcggatcgtaaatctgtttctaaagaacggagaatatctatacatacctgattagaattcatccgtcctttagacaacatttcagacagtctggttttgtacatcttaatcatattcttatgaaacttggaaacatctcttctagtttcactagtacctttattaattctctcaggtacagattttgaattcgacgatgctgagtatttcatcgttgtatatttcttcttcgattgcataatcagattcttatataccgcctcaaactctattttaaaattattaaacaatactctattattaatcagttgttctaactctttcgctatttctatagacttatcgacatcttgactgtctatctctgtaaacacggagtcggtatctccatacacgctacgaaaacgaaatctgtaatctataggcaacgatgtttttacaatcggattaatatctctatcgtccatataaaatggattacttaatggattggcaaaccgtaacataccgttagataactctgctccatttagtaccgattctagatacaagatcattctacgtcctatggatgtgcaactcttagccgaagcgtatgagtatagagcactatttctaaatcccatcagaccatatactgagttggctactattttgtacgtatattgcatggaatcataaatggccttttcagttgaactggtagcctgttttagcatctttttatatctagctctctctgccaaaaatgttcttaatagtctaggaatggttccttctattgatctatcgaaaattgctatttcagagatgaggttcggtagtctaggttcacaatgaaccgtaatatatctaggaggtggatatttctgaagcaatagctgattatttatttcttcttccaatctattggtactaacaacgacaccgactaatgtttccggagatagatttccaaagatacacacattaggatacagactgttataatcaaagattaatacattattactaaacattttttgttttggagcaaataccttaccgccttcataaggaaacttttgttttgtttctgatctaactaagatagttttagtttccaacaatagctttaacagtggacccttgatgactgtactcgctctatattcgaataccatggattgaggaagcacatatgttgacgcacccgcgtctgtttttgtttctactccataatactcccacaaatactgacacaaacaagcatcatgaatacagtatctagccatatctaaagctatgtttagattataatccttatacatctgagctaaatcaacgtcatcctttccgaaagataatttatatgtatcattaggtaaagtaggacataatagtacgactttaaatccattttcccaaatatctttacgaattactttacatataatatcctcatcaacagtcacataattacctgtggttaaaacctttgcaaatgcagcggctttgcctttcgcgtctgtagtatcgttaccgatgaacgtcatttctctaactcctctatttaatactttacccatgcaactgaacgcgttcttggatatagaatccaatttgtacgaatccaatttttcagatttttgaatgaatgaatatagatcgaaaaatatagttccattattgttattaacgtgaaacgtagtattggccatgccgcctactcccttatgactagactgatttctctcataaatacagagatatacagcttcctttttgtctggagatctaaagataatcttctctcctgttaataactctagacgattagtaatatatctcagatcaaagttatgtccgttaaaggtaacgacatagtcgaacgttagttccaacaattgtttagctattcgtaacaaaactatttcagaacataaaactagttctcgttcgtaatccatttccattagtgactgtatcctcaaacatcctctatcgacggcttcttgtatttcctgttctgttaacatctcttcattaatgagcgtaaacaataatcgtttaccacttaaatcgatataacagtaacttgtatgcgagattgggttaataaatacagaaggaaacttcttatcgaagtgacactctatatctagaaataagtacgatcttgggatatcgaatctaggtatttttttagcgaaacagttacgtggatcgtcacaatgataacatccattgttaatctttgtcaaatattgctcgtccaacgagtaacatccgtctggagatatcccgttagaaatataaaaccaactaatattgagaaattcatccatggtggcattttgtatgctgcgtttctttggctcttctatcaaccacatatctgcgacggagcattttctatctttaatatctagattataacttattgtctcgtcaatgtctatagttctcatctttcccaacggcctcgcattaaatggaggaggagacaatgactgatatatttcgtccgtcactacgtaataaaagtaatgaggaaatcgtataaatacggtctcaccatttcgacatctggatttcagatataaaaatctgttttcaccgtgactttcaaaccaattaatgcaccgaacatccatttatagaatttagaaatatattttcatttaaatgaatcccaaacattggggaagagccgtatggaccattatttttatagtactttcgcaagcgggtttagacggcaacatagaagcgtgtaaacgaaaactatatactatagttagcactcttccatgtcctgcatgtagacggcacgcgactattgctatagaggacaataatgtcatgtctagcaatgatctgaattatatttattattttttcatcagattatttaacaatttggcatctgatcccaaatacgcaatcaatgtgtcaaaggttaaacctttataaacttaacccattataaaacttatgattagtcacgactgaaataaccgcgtgattattttttggtataattctacacggcatggtttctgtaactatgaattcaacccccgttacattagtgaaatctttaacaaacagcaagggttcgtcaaagacataaaactcattgtttacaatcgaaatagaccccctatcacacttaaaataaaaaatatccttatcctttaccaccaaataaaattctgattggtcaatgtgaatgtattcacttaacagttccacaaatttatttattaactccgaggcacatacatcgtcggtattttttatggcaaactttactcttccagcatccgtttctaaaaaaatattaacgagttccatttatatcatccaatattattgaaataacgttgatggacaaataatacaaataagaaggtacggtacctttgtccaccatctcctccaattcatgctctattttgtcattaactttaatgtatgaaaacagtacgccacatgcttccatgacagtgtgtaacactttggatacaaaatgtttgacattagtataattgttcaagactgtcaatctataatagatagtagctataatatattctatgatggtattgaagaagatgacaaccttggcatattgatcatttaacacagacatggtatcaacagatagcttgaatgaaagagaatcagtaattggaataagcgtcttctcgatagagtgtccgtataccaacatgtctgatattttgatgtattccattaaattatttagttttttctttttattttcgttaaacagcatttctgtcaacggaccccaacatcgttgaccgattaagttttgattgatttttccgtgtaaggcgtatctagtcagatcgtatagcctatccaataatccatcatctgtgcgtagatcacatcgtacactttttaattctttatagaagagcgacagacatctggagcaattacagacagcaatttctttattctctacagatgtaagatacttgaagacattcctatgatgatgcagaattttggataacacggtattgatggtatctgttaccataattcctttgatggctgatagtgtcagagcacaagatttccaatctttgacaatttttagcaccattatctttgttttgatatctatatcagacagcatggtgcgtctgacaacacagggattaagacggaaagatgaaatgattctctcaacatcttcaatggataccttgctattttttctggcattatctatatgtgcgagaatatcctctagagaatcagtatcctttttgatgatagtggatctcaatgacatgggacgtctaaaccttcttattctatcaccagattgcatggtgatttgtcttctttcttttatcataatgtaatctctaaattcatcggcaaattgtctatatctaaaatcataatatgagatgtttacctctacaaatatctgttcgtccaatgttagagtatctacatcagttttgtattccaaattaaacatggcaacggatttaattttatattcctctattaagtcctcgtcgataataacagaatgtagataatcatttaatccatcgtacatggttggaagatgcttgttgacaaaatctttaattgtcttgatgaaggtgggactatatctaacatcttgattaataaaatttataacattgtccataggatactttgtaactagttttatacacatctcttcatcggtaagtttagacagaatatcgtgaacaggtggtatattatattcatcagatatacgaagaacaatgtccaaatctatattgtttaatatattatatagatgtagcgtagctcctacaggaatatctttaactaagtcaatgatttcatcaaccgttagatctattttaaagttaatcatataggcattgatttttaaaaggtatgtagccttgactacattttcattaattaaccattccaagtcactgtgtgtaagaagattatattctatcataagcttgactacatttggtcccgataccattaaagaattcttatgatataaggaaacagcttttaggtactcatctactctacaagaattttggagagccttaacgatatcagtgacgtttattatttcaggaggaaaaaacctaacattgagaatgtcggagttaatagcttccagatacagtgattttggcaatagtccgtgtaatccataatccagtaacacgagctggtgcttgctagacaccttttcaatgtttaatttttttgaaataagctttgataaagccttcctcgcaaattccggatacatgaacatgtcggcgacatgattaagtattgttttttcattatttttat

SEQ ID NO: 19 - DNA, 25566 bp, Horsepox virus
attaacgagttccatttatatcatccaatattattgaaataacgttgatggacaaataatacaaataagaaggtacggtacctttgtccaccatctcctccaattcatgctctattttgtcattaactttaatgtatgaaaacagtacgccacatgcttccatgacagtgtgtaacactttggatacaaaatgtttgacattagtataattgttcaagactgtcaatctataatagatagtagctataatatattctatgatggtattgaagaagatgacaaccttggcatattgatcatttaacacagacatggtatcaacagatagcttgaatgaaagagaatcagtaattggaataagcgtcttctcgatagagtgtccgtataccaacatgtctgatattttgatgtattccattaaattatttagttttttctttttattttcgttaaacagcatttctgtcaacggaccccaacatcgttgaccgattaagttttgattgatttttccgtgtaaggcgtatctagtcagatcgtatagcctatccaataatccatcatctgtgcgtagatcacatcgtacactttttaattctttatagaagagcgacagacatctggagcaattacagacagcaatttctttattctctacagatgtaagatacttgaagacattcctatgatgatgcagaattttggataacacggtattgatggtatctgttaccataattcctttgatggctgatagtgtcagagcacaagatttccaatctttgacaatttttagcaccattatctttgttttgatatctatatcagacagcatggtgcgtctgacaacacagggattaagacggaaagatgaaatgattctctcaacatcttcaatggataccttgctattttttctggcattatctatatgtgcgagaatatcctctagagaatcagtatcctttttgatgatagtggatctcaatgacatgggacgtctaaaccttcttattctatcaccagattgcatggtgatttgtcttctttcttttatcataatgtaatctctaaattcatcggcaaattgtctatatctaaaatcataatatgagatgtttacctctacaaatatctgttcgtccaatgttagagtatctacatcagttttgtattccaaattaaacatggcaacggatttaattttatattcctctattaagtcctcgtcgataataacagaatgtagataatcatttaatccatcgtacatggttggaagatgcttgttgacaaaatctttaattgtcttgatgaaggtgggactatatctaacatcttgattaataaaatttataacattgtccataggatactttgtaactagttttatacacatctcttcatcggtaagtttagacagaatatcgtgaacaggtggtatattatattcatcagatatacgaagaacaatgtccaaatctatattgtttaatatattatatagatgtagcgtagctcctacaggaatatctttaactaagtcaatgatttcatcaaccgttagatctattttaaagttaatcatataggcattgatttttaaaaggtatgtagccttgactacattttcattaattaaccattccaagtcactgtgtgtaagaagattatattctatcataagcttgactacatttggtcccgataccattaaagaattcttatgatataaggaaacagcttttaggtactcatctactctacaagaattttggagagccttaacgatatcagtgacgtttattatttcaggaggaaaaaacctaacattgagaatgtcggagttaatagcttccagatacagtgattttggcaatagtccgtgtaatccataatccagtaacacgagctggtgcttgctagacaccttttcaatgtttaatttttttgaaataagctttgataaagccttcctcgcaaattccggatacatgaacatgtcggcgacatgattaagtattgttttttcattatttttatattttctcaacaagttctcaataccccaatagatgatagaatatcacccaatgcgtccatgttgtctatttccaacaggtcgctatatccaccaatagaagtttttccaaaaaagattctaggaacagttctaccaccagtaatttgttcaaaatagtcacgcaattcattttcgggtttaaattctttaatatcgacaatttcatacgctcctcttttgaaactaaacttatttagaatatccagtgcatttctacaaaaaggacatgtatacttgacaaaaattgtcactttgttattggccaacctttgttgtacaaattcctcggccattttaatatttaagtgatataaaactatctcgacttatttaactctttagttgagatatatggacgcagatagctatatgatagccaactacagaaggcaaacgctataaaaaacataattacgacgagcatatttataaatatttttattcagcattacttgatatagtaatattaggcacagtcaaacattcaactactttcgatacattaactttctcattttctttaacaaattctgcaatatcttcgtaaaaagattcttgaaactttttagaatatctatcgactctagatgaaatagcgttcgtcaacatactatgttttgtatacataaaggcgcctattttaacagtttctagtgacaaaatgctagcgatcctaggatcctttaaaatcacatagattgacgattcgtctctcttagtaactctagtaaaataatcatacaatctagtacgcgaaataatattatccttgacttgaggagatctaaacaatctagttttgagaacatcgataagttcatcgggaatgacatacatactatctttaatagaactcttttcatccagttgaatggattcgtccttaaccaactgattaatgagatcttctattttatcattttccagatgatacgtatgtccattaaagttaaattgtgtagcgcttctttttagtctagcagccaatactttaacatcactaatatcgatatacaaaggagatgatttatcgatggcattaagaattcgtttttcgacatctgtcaaaaccaattcctttttgcctgtatcgtccagtttgccattctttgtaaagaaattattttctactagactattaataagactgataaggattcctccataattgcacaatccaaactttttcacaaaactagactttacgagatctacaggaatgcgtacttcaggttttttagcttgtgattttttcttttgcggacattttctagtgaccaactcatctaccatttcattgattttagcagtgaaataagctttcaatgcacgggcactgatactattgaaaacgagttgatcttcaaattccgccatttaagtttaccaaacaacttttaaatacaaatatatcaatagtagtagaataagaactataaaaaaaataataattaaccaataccaaccccaacaacctgtattattagttgatgtggtagttttctcatcacttagaacagatttaacaatttctataaagtctgtcagatctgtcaaatcatctttcggagaacccatatatacaccaaatatagcggcgtacaacttatccatttatacattaaatattggcttttctttatcgctatcttcatcatattcatcatcaatatcaacaagtcccagattacgagccagatcttcttctacattttcagtcattgatacacgttcactatctccagagagtccgataacgttagccaccacttctctatcaatgattagtttcttgagcgcgaaagtaatttttgtttctgttccggatctatagaagacgataggtgtgataattgccttggccaattgtctttctcttttactgagtgattctagttcaccttctatagatctgagaatggatgattctccagccgaaacatattctaccatggctccgtttaatttgttgatgaagatggattcatccttaaatgttttctctgtaatagtttccaccgaaagactatgcaaagaatttggaatgtgttccttgtgcttaatgtttccatagacagcttctagaagttgatacaacataggactagccgcggtaacttttatttttagaaagtatccatcgcttctatcttgtttagatttatttttataaagtttagtctctccttccaacataataaaagtggaagtcatttgactagataaactatcagtaagttttatagagatagatgaacaattagcgtattgagaagcatttagtgtgacgtattcgatacattttgcattagatttactaatcgattttgcatactctataacacccgcacaagtctgtagagaatcgctagatgctgtaggtcttggtgaagtttcaactctcttcttaattaccttactcatgattaaacctaaataattgtactttgtaatataatgatatatattttcactttatctcatttgaaaataaaaatgtttttgtttaaccgctgcatgatgtacagatttcggaatcacaaaccactggtggttttattttatccttgtccaatgtgaattgaatgggagcggatgcgggtttcgtacgtagatagtacatttccgtttttagaccgagactccatccgtaaaaatgcatactcgttagtttgaaataactcggatctgctatatggatattcatagattgactttgatcgatgaaggctcccctgtctgcagccatttttatgatcgtcttttgtgaaatttcccaaatagttttataaactcgcttaatatcttctggaaggtttgtattctaagtggatccaccatctgccataatcctattcttgatctcatcatttcataattttttctcggttaaaactctaaggagatgcggattaactacttgaaattctccagacaatactctccgagtgtaaatattactggtatatggtttcaccgactcattattttccaaaatttgagcagttgatgccgtcggcataggtgccaccaataaactatttctaagaccgtatgttttgattttatcttttagaggtttccaattccaaagatctgacggtacaacattccaaagatcatattgtagaataccgttactggcgtacgatcttacatatgattcataaggtccttccttttcagctagttcacaactcgcatctaatgcaccgtaggtttcgaagatcttcttatttagatcttgtgcttccaggctatcaaatggataatttaagagaataaacgcgtccgctaatccttgaacaccaataccgataggtctatgtctcttattagagatttcagcttttggaataggataataattaatatctataattttattgagatttctgacaattactttgaccacatcctttagtttgaaaaaatcaaattgtccatctattacaaacatgtttaacgcgacagatgccagattacaaacggctacctcattagcatctgcatattgtattatttcagtgcagaggttactacacttaatggttcctaaattttgttgattactctttttgttacacgcatccttataaagaatgaacggagtaccagtttcaatctgagattctataatcgctttccagacgactcgagccttcatatagtcttgtatctcttttctctttcgtattgtatataatcgttcgaactcgtctccccaaacattgtttaatccagaacattcatccaaacacatcaacgaccactctccgtcatccttcactcgtttcataaagagatcaggaatccaaagagctataaataaatctctggttctatgtttctcgtttcctgtattctttttaaaatcgaggaacgccataatatcagaatgccacggttccaagtatatggccataactcccggtcgtttgtttcctccctgatccatgtatctagcggtgttattataaactctcaacattggaataataccgtttgatataccattagtaccggagatatagcttccactggcacgaatattactaattgataaacctattccccctgccattttagagattaatgcgcatcgttttaacgtatcatagatgccctctatactatcatccatcatgttaagtaaaaaaacatctagacatttggtgacgactagttctcgcattaaataaggtaggagaagcgtgcgtaaaccatttttcagaaagtagattgtacgtctcaatagctaagtctatattccattgatgtatttttaccgcgacacgcattaacatgtgctgaggtttttcaacgatcttgttgtttatttttaacaagtaggatttttccaaagttttaaaaccaaaatagttgtatgaaaagtttcgttcgtaaataataaccgaattgagtttatccttatatttgttaactatatccatggtgatacttgaaataatcggagaatgtttcccatttttaggattaacatagttgaataaatccttcatcacttcactaaatagttttttgtttccttgtgtagatttgatacggctattctggcggctagaatggcataatccggatgttgtgtagtacaagtggctgctatttcggctaccagagtgttcaattctaccgttgttactccattatatattccttgaataaccttcatagctattttaataggatctatatgatccgtgtttaagccataacataattttctaatacgagacgtaattttatcaaacatgacattttccttgtatccatttcgtttaatgacaaacatttttgttggtgtaataaaaaaaattatttaacttttcattaatagggatttgacgtacgtagcgtacaaaatgattgttcctggtatatagataaagagtcctatatatttgaaaatcgttacggctcgattaaactttaatgattgcattgtgaatatatcattaggatttaactccttgactatcagggcggcaccagaaatcaccatcaaaagcattaatacagttatgcctatcgcagttagaacggttatagcatccaccatttatatctaaaaattagatcaaagaatatgtgacaaagtcctagttgtatattgagaattgacgaaacaatgtttcttacatattttttttttattagtaaccgacttaatagtaggaactggaaaactagacttgattattctataagtatagatacccttccagataatgttctctttgataaaagttccagaaaatgtagaattttttaaaaagttatcttttgctattaccaagattgtgtttagacgcttattattaatatgagtaatgaaatccacaccgcctctagatatcgcctttatttccacattagatggtaaatccaatagtgaaactatctttttaggaatgtatggactcgcgtttagaggagtgaacgtcttgggcgtcggaaaggatgattcgtcaaacgaataaacaatttcacaaatggatgttaatgtattagtaggaaatttcttgacgctattggagttgaagattctaatggatgatgttctacctatttcatccgataacatgttaatttccgacaccaacggttttaatatttcgatgatatacggtagtctctctttcggacttatatagcttattccacaatacgagtcattatatactccaaaaaacaaaataactagtataaaatctgtatcgaatgggaaaaacgaaattatcgacataggtatagaatctggaacattgaacgtattaatacttaattctttttctgtggtaagtaccgataggttattgacattgtatggttttaaatattctataacttgagacttgatagatattagtgatgaattgaaaattatttttatcaccacgtgtgtttcaggatcgtcgtcgacgcccgtcaaccaaccgaacggagtaaaataaatatcattaatatatgctctaaatattagtatttttattaatcctttgattatcatcttctcgtacgcgaatgattccatgatcaagagtgatttgagaacatcctccggagtattaatgggcttagtaaacagtacatcgttgcaataataaaagttatccaagttaaaggatattatgcattcgtttaaagatatcacctcatctgacggagacaattttttggtaggttttagagactttgaagctacttgtttaacaaagttattcatcgtcgtttactattctatttaattttgtagttaatttatcacatatcacattaattgactttttggtccacttttccatacgtttatattcttttaatcctgcgttatccgtttccgttatatccagtgatagatcgtgcaagttaaatagaatgctcttaaataatgtcattttcttatccgctaaaaatttaaagaatgtataaacctttttcagagatttgaaactcttaggtggtgtcctagtacacaatatcataaacaaactaataaacattccacattcagattccaacagctgattaacttctacattaatacagcctattttcgctccaaatgtacattcgaaaaatctgaataaaacatcaatgtcgcaatttgtattatccaatacagaatgtttgtgattcgtgttaaaaccatcggagaaggaatagaaataaaaattattatagtggtggaattcagttggaatattgcctccggagtcataaaaggatactaaacattgttttttatcataaattacacatttccaatgagacaaataacaaaatccaaacattacaaatctagaggtagaacttttaattttgtctttaagtatatacgataagatatgtttattcataaacgcgtcaaatttttcatgaatcgctaaggagtttaagaatctcatgtcaaattgtcctatataatccacttcggatccataagcaaactgagagactaagttcttaatacttcgattgctcatccaggctcctctctcaggctctattttcatcttgacgacctttggattttcaccagtatgtattcctttacgtgataaatcatcgattttcaaatccatttgtgagaagtctatcgccttagatactttttcccgtagtcgaggtttaaaaaaatacgctaacggtatactagtaggtaactcaaaaacatcatatatagaatggtaacgcgtctttaactcgtcggttaactctttcttttgatcgagttcgtcgctactattgggtctgctcaggtgccccaactctactagttccaacatcataccgataggaatacaagacactttgccagcggttgtagatttatcatatttttccactacatatccgttacaatttgttaaaaatttagatacatctatattgctacataatccagctagtgaatatatatgacataataaattggtaaatcctagttctggtattttactaattactaaatctgtatatctttccatttatcatggaaaagaatttaccagatatcttcttttttccaaactgcgttaatgtattctcttacaaatattcacaagatgaattcagtaatatgagtaaaacggaacgtgatagtttctcattggccgtgtttccagttataaaacatagatggcataacgcacacgttgtaaaacataaaggaatatacaaagttagtacagaagcacgtggaaaaaaagtatctcctccatcactaggaaaacccgcacacataaacctaaccacgaaacaatatatatacagtgaacacacaataagctttgaatgttatagttttctaaaatgtataacaaatacagaaatcaattcgtttgatgagtatatattaagaggactattagaagctggtaatagtttacagatattttccaattccgtaggtaaacgaacagatactataggtgtactagggaataagtatccatttagcaaaattccattggcctcattaactcctaaagcacaacgagagatatttttagcgtggatttctcatagacctgtagttttaactggaggaaccggagtgggtaagacgtcacaggtacccaagttattgctttggtttaattatttatttggtggattctttactctagataaaatcactaactttcacgaaagaccagtcattctatctcttcctaggatagctttagttagattgcatagcaataccattttaaaatcattgggatttaaggtactagatggatctcctatttctttacggtacggatctataccggaagaattaataaacaaacaaccaaaaaaatatggaattgtattttctacccataagttatctctaacaaaactatttagttatggcactcttattatagacgaagttcatgagcatgatcaaataggagatattattatagcagtagcgagaaagcatcatacgaaaatagattctatgtttttaatgactgccacattagaggatgaccgagaacggctaaaagtatttttacctaatcccgcatttatacatattcctggaaatacactgtttaaaattagcgaggtatttattcataataagataaatccatcttccagaatggcatacatagaagaagaaaagagaaatttagttactgctatacagatgtatactcctcctgatggatcatccggtatagtctttgtggcatccgttgcacagtgtcacgaatataaatcatatttagaaaaaagattaccgtatgatatgtatattattcatggtaaggtcttagatatagacgaaatattagaaaaagtgtattcatcacctaatgtatcgataattatttctactccttatttggaatccagcgttactatacgcaatgttacacacatttatgatatgggtagagtttttgttcccgctccttttggaggatcgcaagaatttatttctaaatctatgagagatcaacgaaaaggaagagtaggaagagttaatcctgggacatacgtatatttctatgatctgtcttatatgaagtctatacagcgaatagattcagaatttctacataattatatattgtacgctaataagtttaatctaacactccccgaagatttgtttataatccctacaaatttggatattctatggcgcacaaaggaatatatagactcgttcgatattagtacagaaacatggaataaattattatccaattattatatgaagatgatagagtatgctaaactttatgtactaagtcctattctcgctgaggagttggataattttgagaggacgggagaattaactagtattgtacaagaagccattttatctctaaatttacgaattaagattttaaattttaaacataaagatgatgatacgtatatacacttttgtaaaatattattcggtgtctataacggaacaaacgctactatatattatcatagacctctaacgggatatatgaatatgatttcagatactatatttgttcctgtagataataactaaaaattaaactctaatgaccacatctttttttaaagatgaaaaattttctacatctccttttgtagacacaactaaacattttgcagaaaaaagtttattattgtttagataatcgtatacttcatcagtgtagatagtaaatgtgaacaaataaaaggtattcttactcaatagattggtaaattccatagaatatattagtcctttcttcttgagatcccacatcatttcaaccagagacgttttatccaatgatttacctcgtactataccacatacaaaactagattttgcagtgacgttgtacctggtattcctaccaaacaaaattttacttttagttcttttagaaaattctaaggtagaatctctatttgccaatatgtcatctatggaattaccactagcaaaaaatgatagaaatatatattgatacatcgcagctggttttgatctactatactttaaaaacgaatcagattccataattgcctgtatatcatcagctgaaaaactatgttttacacgtattccttcggcatttctttttaatgatatatcttgtttagacaatgataaagttatcatgtccatgagagacgcgtctccgtatcgtataaatatttcattagatgttagacgcttcattaggggtatacttctataaggtttcttaattagtccatcatttgttgcgtcaagaactactatcggatgttgttgggtatctctagtgttacacatggccttactaaagtttgggtaaataactatgatatctctattaattatagatgcatatatttcatttgtcaaggatattagtatcgacttgctatcgtcattaatacgtgtaatgtaatcatataaatcatgcgatagccaaggaaaatttaaatagatgttcatcatataatcgtcgctataattcatattaatacgttgacattgactaatttgtaatatagcctcgccacgaagaaagctctcgtattcagtttcatcgataaaggataccgttaaatataactggttgccgatagtctcatagtctattaagtggtaagtttcgtacaaatacagaatccctaaaatattatctaatgttggattaatctttaccataactgtataaaatggagacggagtcataactattttaccgtttgtacttactggaatagacgaaggaataatctccggacatgctggtaaagacccaaatgtctgtttgaagaaatccaatgttccaggtcctaatctcttaacaaaaattacaatattcgatcccgatatcctttgcattctatttaccagcatatcacgaactatattaagattatctatcatgtctattctcccaccgttatataaatcgcctccgctaagaaacgttagtatatccatacaatggaatacttcatttctaaaatagtattcgttttctaattctttaatgtgaaatcgtatactagaaagggaaaaattatctttgagttttccgttagaaaaaaaccacgaaactaatgttctgattgcgtccgattccgttgctgaattaatggatttacaccaaaaactcatataacttctagatgtagaagcattcgctaaaaaattagtagaatcaaaggatataagtagatgttccaacaagtgagcaattcccaagatttcatctatatcattttcgaatccgaaattagaaattcccaagtagatatcctttttcatccgatcattgatgaaaatacgaactttattcggtaagacaatcatttactaaggagtaaaataggaagtaatgttcgtatgtcgttatcatcgtataaattaaaggtgtgttttttaccattaagtgacattataattttaccaatattggaattataatataggtgtatttgcgcactcgcgacggttgatgcatcggtaaatatagctgtatctaatgttctagtcggtatttcatcatttcgctgtctaataatagcgttttctctatctgtttccattacagctgcctgaagtttattggtcggataatatgtaaaataataagaaatacatacgaataacaaaaataaaataagatataataaagatgccatttagagatctaattttgtttaacttgtccaaattcctacttacagaagataaggaatcgttggagttagtgtcttccttatgtaggggatttgaaatatcttataatgacttaataacttactttccagataggaaataccataaatatatttctaaagtatttgaacatgtagatttatcggaggaattaagtatggaattccatgatacaactttgcgagatttagtttatcttagattgtacaagtattccaagtgtatacggccgtgttataaattaggagataatctaaaaggcatagttgttataaaggacagaaatatatatattagagaagcaaatgatgacttgatagaatatctcctcaaggaatacactcctcagatttatacatattctaatgagcgagttcccatagctggttcaaaattaattctttgtggattttctcaagttacatttatggcgtatacaacgtctcatataacaacaaataaaaaggtagatgttctcgtttccaaaaaatgtatagatgaactagtcgatccaataaattatcaaatacttcaaaatttatttgataaaggaagcggaacaataaacaaaatactcaggaagatattttattcggtaaccggtggccaaactccataatttgctttttctatttcggattttagaatttccaaattcaccagcgatttatctgttttggtgaaatccaaggatttattaatgtccacaaatgccatttgttttgtctgtggattgtatttgaaaatggaaacgatgtagttagatagatgcgctgcgaagtttcctattagggttccgcgcttcacgtcacccagcatacttgaatcaccatcctttaaaaaaaatgataagatatcaacatggagtatatcatactcggattttaattcttctactgactcactgacattttcacaaatactacaatacggtttaccgaaaataatcaatacgttcttcatttatgggtatcaaaaacttaaaatcgttactgctggaaaataaatcactgacgatattagatgataatttatacaaagtatacaatggaatatttgtggatacaatgagtatttatatagccgtcgccaattgtgtcagaaacttagaagagttaactacggtattcataaaatacgtaaacggatgggtaaaaaagggagggcatgtaaccctttttatcgatagaggaagtataaaaattaaacaagacgttagagacaagagacgtaaatattctaaattaaccaaggacagaaaaatgttagaattagaaaagtgtacatccgaaatacaaaatgttaccggatttatggaagaagaaataaaggcagaaatgcaattaaaaatcgataaacttacatttcaaatatatttatctgattctgataacataaaaatatcattgaatgagatactaacacatttcaacaataatgagaatgttacattattttattgtgatgaacgagacgcagaattcgttatgtgtctcgaggctaaaacacatttctctaccacaggagaatggccgttgataataagtaccgatcaggatactatgctatttgcatctgctgataatcatcctaagatgataaaaaacttaactcaactgtttaaatatgttccatctgcagaggataactatttagcaaaattaacggcgttagtgaatggatgtgatttctttcctggactctatggggcatctataacacccaccaacttaaacaaaatacaattgtttagtgattttacaatcgataatatagtcactagtttggcaattaaaaattattatagaaagactaactctaccgtagacgtgcgtaatattgttacgtttataaacgattacgctaatttagacgatgtctactcgtatattcctccttgtcaatgcactgttcaagaatttatattttccgcattagatgaaaaatggaacaattttaaatcatcttatttagagaccgttccgttaccctgtcaattaatgtacgcgttagaaccacgtaaggagattgatgtttcagaagttaaaactttatcatcttatatagatttcgaaaatactaaatcagatatcgatgttataaaatctatatcctcgatcttcggatattctaacgaaaactgtaacacgatagtattcggcatctataaggataatttactactgagtataaataattcattttactttaacgatagtctgttaataaccaatactaaaagtgataatataataaatataggttactagattaaaaatggtgttccaactcgtgtgctctacatgcggtaaagatatttctcacgaacgatataaattgattatacgaaaaaaatcattaaaggatgtactcgtcagtgtaaagaacgaatgttgtaggttaaaattatctacacaaatagaacctcaacgtaacttaacagtgcaacctctattggatataaactaatatggatccggttaattttatcaagacatatgcgcctagaggttctattatttttattaattataccatgtcattaacaagtcatttgaatccatcgatagaaaaacatgtgggtatttattatggtacgttattatcggaacacttggtagttgaatcaacatatagaaaaggagttcgaatagtcccattggatagtttttttgaaggatatcttagtgcaaaagtatacatgttagagaatattcaagttatgaaaatagcagctaatacgtcgttaactttactaggtattccatatggatttggtcatgatagaatgtattgttttaaattggtagctgactgttataaaaatgccggtgttgaaacatcgtctaaacgaatattaggtaaagatatttttctgagccaaaacttcacagacgataatagatggataaagatatatgattctaataatttaacattttggcaaattgattaccttaaagggtgagttaatatgcataactactcctccgttgttttttccctcgttctttttcttaacgttgtttgccatcactctcataatgtaaagatattctaaaatggtaaacttttgcatatcggacgcagaaattggtataaatgttgtaattgtattatttcccgtcaatggactagtcacagctccatcagttttatatcctttagagtatttctcactcgtgtctaacattctagagcattccatgatctgtttatcgttgatattggccggaaagatagattttttattttttattatattactattggcaattgtagatataacttctggtaaatatttttctaccttttcaatctcttctattttcaagccggctatatattctgctatattgttgctagtatcaataccttttctggctaagaagtcatatgtggtattcactatatcagttttaactggtagttccattagcctttccacttctgcagaataatcagaaattggttctttaccagaaaatccagctactataataggctcaccgatgatcattggcaaaatcctatattgtaccagattaatgagagcatatttcatttccaataattctgctagttcttgagacattgatttatttgatgaatctagttggttctctagatactctaccatttctgccgcatacaataacttgttagataaaatcagggttatcaaagtgtttagcgtggctagaatagtgggcttgcatgtattaaagaatgcggtagtatgagtaaaccgttttaacgaattatatagtctccagaaatctgtggcgttacatacatgagccgaatgacatcgaagattgtccaatatttttaatagctgctctttgtccattatttctatatttgactcgcaacaattgtaaataccattaatcactgattcctttttcgatgccggacaatagcacaattgtttagctttggactctatgtattcagaattaatagatatatctcttaatacagattgcactatacattttgaaactatgtcaaaaattgtagaacgacgctgttctgcagccatttaactttaaataatttacaaaaatttaaaatgagcatccgtataaaaatcgataaactgcgccaaattgtggcatatttttcagagttcagtgaagaagtgtctataaatgtagactcgacggatgagttaatgtatatttttgccgccttgggtggatctgtaaacatttgggccattatacctctcagtgcatcagtgttctaccgcggagccgaaaatattgtgtttaatcttccggtgtccaaggtaaaatcgtgtttgtgtagttttcacaatgatgccatcatagatatagaacctaatctggaaaataatctagtaaaactttctagttatcatgtagtaagtgtcgattgtaacaaggaactgatgcctattaggacagatactactatttgtctaagtatagatcaaaagaaatcttacgtgtttaattttcacaagtatgaagaaaaatgttgtggtagaaccgtcattcatttagaatggttgttgggctttatcaagtgtattagtcagcatcagcatttggctattatgtttaaagatgacaatattattatgaagactcctggtaatactgatgcgttttccagggaatattctatgactgaatgttctcaagaactacaaaagttttctttcaaaatagctatctcgtctctcaacaaactacgaggattcaaaaagagagtcaatgtttttgaaactagaatcgtaatggataatgacgataacattttaggaatgttgttttcggatagagttcaatcctttaagatcaacatctttatggcgtttttagattaatactttcaatgagataaatatgggtggcggagtaagtgttgagctccctaaacgggatccgcctccgggagtacccactaatgagatgttattaaacgttgataaaatgcatgacgtgatagctcccgctaagcttttagaatatgtgcatataggaccactagcaaaagataaagaggataaagtaaagaaaagatatccagagtttagattagttaacacaggacccggtggtctttcagcattattaagacaatcgtataatggaaccgcacccaattgctgtcgcacttttaatcgtactcattattggaaaaaggatggaaagatatcagataagtatgaagagggtgcaatattagaatcgtgttggccagacgttcacgacaccggaaaatgcgatgttgatttattcgactggtgtcagggggatacgttcgatagaaacatatgccatcagtggatcggttcagcctttaataggagtaatagaactgtagagggtcaacaatcgttaataaatctgtataataagatgcaaacattatgtagtaaagatgctagtgtaccaatatgcgaatcatttttgcattatttacgcgcacacaatacagaagatagcaaagagatgatcgattatattctaagacaacagtctgcggactttaaacagaaatatatgagatgtagttatcccactagagataagttagaagagtcattaaaatatgcggaacctcgagaatgttgggatccagagtgttcgaatgccaatgttaatttcttactaacacgtaattataataatttaggactttgcaatattgtacgatgtaataccagcgtgaacaacttacagatggataaaacttcctcattaagattgtcatgtggattaagcaatagtgatagattttctactgttcccgtcaatagagcaaaagtagttcaacataatattaaacactcgttcgacctaaaattgcatttgatcagtttattatctctcttggtaatatggatactaattgtagctatttaaatgggtgccgcagcaagcatacagacgacggtgaatacactcagcgaacgtatctcgtctaaattagaacaagaagcgaatgctagtgctcaaacaaaatgtgatatagaaatcggaaatttttatatccgacaaaaccatggatgtaacctcactgttaaaaatatgtgctctgcggacgcggatgctcagttggatgctgtgttatcagccgctacagaaacatatagtggattaacaccggaacaaaaagcatacgtaccagctatgtttactgctgcgttaaacattcagacaagtgtaaacactgttgttagagattttgaaaattatgtgaaacagacttgtaattctagcgcggtcgtcgataacaaattaaagatacaaaacgtaatcatagatgaatgttacggagccccaggatctccaacaaatttggaatttattaatacaggatctagcaaaggaaattgtgccattaaggcgttgatgcaattgactactaaggccactactcaaatagcacctaaacaagttgctggtacaggagttcagttttatatgattgttatcggtgttataatattggcagcgttgtttatgtactatgccaagcgtatgctgttcacatccaccaatgataaaatcaaacttattttagccaataaggaaaacgtccattggactacttacatggacacattctttagaacttctccgatggttattgctaccacggatatgcaaaactgaaaatatattgataatattttaatagattaacatggaagttatcgctgatcgtctagacgatatagtgaaacaaaatatagcggatgaaaaatttgtagattttgttatacacggtctagagcatcaatgtcctgctatacttcgaccattaattaggttgtttattgatatactattatttgttatagtaatttatatttttacggtacgtctagtaagtagaaattatcaaatgttgttggtgttggtggcgctagtcatcacattaactattttttattactttatactataatagtactagactgacttctaacaaacatctcacctgccataaataaatgcttgatattaaagtcttctatttctaacactattccatctgtggaaaataatactctgacattatcgctaattgacacatcggtgagtgatatgcctataaagtaataatcttctttgggcacatataccagtgtaccaggttctaacaacctatttactggtgctcctgtagcatactttttctttaccttgagaatatccatcgtttgcttggtcaatagcgatatgtgattttttatcaaccactcaaaaaagtaattggagtgttcatatcctctacgggctattgtctcatggccgtgtatgaaatttaagtaacacgactgtggtagatttgttctatagagccgattgccgcaaatagatagaactaccaatatgtctgtacaaatgttaaacattaattgattaacagaaaaaacaatgttcgttctgggaatagaaaccagattaaaacaaaattcgttagaatatatgccacgtttatacatggaatataaaataactacagtttgaaaaataacagtatcatttaaacatttaacttgaggggttaatttcacaactttactgtttttgaactgttcaaaatatagcatcgatccatgagaaatacgtttagccgcctttaatagaggaaatcctaccgcctttctggatctcaccaacgacgatagttctgaccagcaacttatttcttcatcatccacctgttttaacatataataggcaggagatagatatccgtcattgcaatattccttttcgtaggcacacaatctaatattgataaaatctccattctcttctctgcatttattatcttgtttcggtggctgattaggctgtagtcttggtttaggctttggtatatcgttgttgaatctattttggtcattaaatctttcatttcttcctggtatatttttatcacctcgtttggttggatttttgtctatattatcgtttgtaacatcggtacgggtattcatttatcacaaaaaaaacttctctaaatgagtctactgctagaaaaccttatcgaagaagataccatattttttgcaggaagtatatctgagtatgatgatttacaaatggttattgccggcgcaaaatccaaatttccaagatctatgctttctatttttaatatagtacctagaacgatgtcaaaatatgagttagagttgattcataacgaaaatatcacaggagcaatgtttaccacaatgtataatataagaaacaatttgggtctaggagatgataaactaactattgaagccattgaaaactatttcttggatcctaacaatgaagttatgcctcttattattaataatacggatatgactgccgttattcctaaaaaaagtggtaggagaaagaataaaaacatggttatcttccgtcaaggatcatcacctatcttgtgcattttcgaaactcgtaaaaagattaatatttataaagaaaatatggaatccgcatcaactgagtatacacctatcggagacaacaaggctttgatatctaaatatgcgggaattaatatcctgaatgtgtattctccttccacatccataagattgaatgccatttacggattcaccaataaaaataaactagagaaacttagtactaataaggaactagaatcgtatagttctagccctcttcaagaacccattaggttaaatgattttctgggactattggaatgtattaaaaagaatattcctctaacagatattccgacaaaggattgattactataaatggagaatgttcctaatgtatactttaatcctgtgtttatagagcccacgtttaaacattctttattaagtgtttataaacacagattaatagttttatttgaagtattcattgtattcattctaatatatgtattttttagatctgaattaaatatgttcttcatgcctaaacgaaaaatacccgatcctattgatagattacgacgtgctaatctagcgtgtgaagacgataagttaatgatctatggattaccatggatgacaactcaaacatctgcgttatcaataaatagtaaaccgatagtgtataaagattgtgcaaagcttttgcgatcaataaatggatcacaaccagtatctcttaacgatgttcttcgcagatgatgattcattttttaagtatttggctagtcaagatgatgaatcttcattatctgatatattgcaaatcactcaatatctagactttctgttattattattgatccaatcaaaaaataaattagaagccgtgggtcattgttatgaatctctttcagaggaatacagacaattgacaaaattcacagactttcaagattttaaaaaactgtttaacaaggtccctattgttacagatggaagggtcaaacttaataaaggatatttgttcgactttgtgattagtttgatgcgattcaaaaaagaatcctctctagctaccaccgcaatagatcctattagatacatagatcctcgtcgtgatatcgcattttctaacgtgatggatatattaaagttgaataaagtgaacaataattaattctttattgtcatcatgaacggcggacatattcagttgataatcggccccatgttttcaggtaaaagtacagaattaattagacgagttagacgttatcaaatagctcaatataaatgcgtgactataaaatattctaacgataatagatacggaacgggactatggacgcatgataagaataattttgaagcattggaagcaactaaactatgcgatgttttggaattaattacagatttctccgtgataggtatcgatgaaggacagttctttccagacattgttgaattctgtgagcgtatggcaaacgaagaaaaaatagttatagtagccgcactcgatgggacatttcaacgtaaaccgtttaataatattttgaatcttattccattatctgaaatggtggtaaaactaactgctgtgtgtatgaaatgctttaaggaggcttccttttctaaacgattgggtgaggaaaccgagatagagataataggaggtaatgatatgtatcaatcggtgtgtagaaagtgttacgtcggctcataatattatattttttatctaaaaaactaaaaataaacattgattaaattttaatataatacttaaaaatggatgttgtgtcgttagataaaccgtttatgtattttgaggaaattgataatgagttagattacgaaccagaaagtgcaaatgaggtcgcaaaaaaactaccgtatcaaggacagttaaaactattactaggagaattattttttcttagtaagttacagcgacacggtatattagatggtgccaccgtagtgtatataggatcggctcctggtacacatatacgttatttgagagatcatttctataatttaggaatgattatcaaatggatgctaattgacggacgccatcatgatcctattctaaatggattgcgtgatgtgactctagtgactcggttcgttgatgaggaatatctacgatccatcaaaaaacaactgcatccttctaagattattttaatttctgatgtaagatccaaacgaggaggaaatgaacctagtacggcggatttactaagtaattacgctctacaaaatgtcatgattagtattttaaaccccgtggcatctagtcttaaatggagatgcccgtttccagatcaatggatcaaggacttttatatcccacacggtaataaaatgttacaaccttttgctccttcatattcagctgaaatgagattattaagtatttataccggtgagaacatgagactgactcgagttaccaaattagacgctgtaaattatgaaaaaaagatgtactaccttaataagatcgtccgtaacaaagtagttgttaactttgattatcctaatcaggaatatgactattttcacatgtactttatgctgaggaccgtatactgcaataaaacatttcctactactaaagcaaaggtactatttctacaacaatctatatttcgtttcttaaatattccaacaacatcaactgaaaaagttagtcatgaaccaatacaacgtaaagtatctagcaaagattttatgtctaaaaacagaaatagcaagagatccgtacgcagtaataaatagaaacgtactactgagatatactaccgatatagagtataatgatttagttactttaataaccgttagacataaaattgattctatgaaaactgtgtttcaggtatttaacgaatcatccataaattatactccggttgatgatgattatggagaaccaatcattataacatcgtatcttcaaaaaggtcataacaagtttcctgtaaattttctatacatagatgtggtaatatctgacttatttcctagctttgttagactagatactacagaaactaatatagttaatagtgtactacaaacaggtgatggtaaaaagactcttcgtcttcccaaaatgttagagacggaaatagttgtcaagattctctatcgccctaatataccattaaaaattgttagatttttccgcaataacatggtaactggagtagagatagccgatagatctgttatttcagtcgctgattaatcaattagtagagatgagataagaacattataataatcaataatatatcttatatcttatatcttatatcttatatcttatatcttatatcttatatcttatatcttatatct

SEQ ID NO: 20 - DNA, 28662 bp, Horsepox virus
atggatgttgtgtcgttagataaaccgtttatgtattttgaggaaattgataatgagttagattacgaaccagaaagtgcaaatgaggtcgcaaaaaaactaccgtatcaaggacagttaaaactattactaggagaattattttttcttagtaagttacagcgacacggtatattagatggtgccaccgtagtgtatataggatcggctcctggtacacatatacgttatttgagagatcatttctataatttaggaatgattatcaaatggatgctaattgacggacgccatcatgatcctattctaaatggattgcgtgatgtgactctagtgactcggttcgttgatgaggaatatctacgatccatcaaaaaacaactgcatccttctaagattattttaatttctgatgtaagatccaaacgaggaggaaatgaacctagtacggcggatttactaagtaattacgctctacaaaatgtcatgattagtattttaaaccccgtggcatctagtcttaaatggagatgcccgtttccagatcaatggatcaaggacttttatatcccacacggtaataaaatgttacaaccttttgctccttcatattcagctgaaatgagattattaagtatttataccggtgagaacatgagactgactcgagttaccaaattagacgctgtaaattatgaaaaaaagatgtactaccttaataagatcgtccgtaacaaagtagttgttaactttgattatcctaatcaggaatatgactattttcacatgtactttatgctgaggaccgtatactgcaataaaacatttcctactactaaagcaaaggtactatttctacaacaatctatatttcgtttcttaaatattccaacaacatcaactgaaaaagttagtcatgaaccaatacaacgtaaagtatctagcaaagattttatgtctaaaaacagaaatagcaagagatccgtacgcagtaataaatagaaacgtactactgagatatactaccgatatagagtataatgatttagttactttaataaccgttagacataaaattgattctatgaaaactgtgtttcaggtatttaacgaatcatccataaattatactccggttgatgatgattatggagaaccaatcattataacatcgtatcttcaaaaaggtcataacaagtttcctgtaaattttctatacatagatgtggtaatatctgacttatttcctagctttgttagactagatactacagaaactaatatagttaatagtgtactacaaacaggtgatggtaaaaagactcttcgtcttcccaaaatgttagagacggaaatagttgtcaagattctctatcgccctaatataccattaaaaattgttagatttttccgcaataacatggtaactggagtagagatagccgatagatctgttatttcagtcgctgattaatcaattagtagagatgagataagaacattataataatcaataatatatcttatatcttatatcttatatcttatatcttatatcttatatcttatatcttatatcttatatcttatatcttgtttagaaaaatgctaatattaaaatagctaacgctagtaatccaatcggaagccatttgatatctataatagggtatctaatttcctgatttaaatagcggacagctatattctcggtagctactcgtttggaatcacaaacattatttacatctaatttactatctgtaatggaaacgtttcccaatgaaatggtacaatccgatacattgcatcttgttatatttttttttaaagaggctggtaacaacgcatcgcttcgtttacatggctcgtaccaacaataatagggtaatcttgtatctattcctatccgtactatgcttttatcaggataaatacatttacatcgtatatcgtctttgttagcatcacagaatgcataaatttgttcgtccgtcatgataaaaatttaaagtgtaaatataactattatttttatagttgtaataaaaagggaaatttgattgtataccttcggttctttaaaagaaactgacttgataaaaatggctgtaatctctaaggttacgtatagtctatatgatcaaaaagagattaatgctacagatattatcattagtcatgttaaaaatgacgacgatatcggtaccgttaaagatggtagactaggtgctatggatggggcattatgtaaaacttgtgggaaaacggaattggaatgtttcggtcactggggtaaagtaagtatttataaaactcatatagttaagcctgaatttatttcagaaattattcgtttactgaattatatatgtattcactgcggattattgcgttcacgagaaccgtattccgacgatattaacctaaaagagttatcgggacacgctcttaggagattaaaggataaaatattatccaagaaaaagtcatgttggaacagtgaatgtatgcaaccgtatcaaaaaattactttttcaaagaaaaaggtttgtttcgtcaacaagttggatgatattaacgttcctaattctctcatctatcaaaagttaatttctattcatgaaaagttttggccattattagaaattcatcaatatccagctaacttattttatacagactactttcccatccctccgttgattattagaccggctattagtttttggatagatagtatacccaaagaaaccaatgaattaacttacttattaggtatgatcgttaagaattgtaacttgaatgctgatgaacaggttatccagaaggcggtaatagaatacgatgatattaaaattatttctaataacactaccagtatcaatttatcatatattacatccggcaaaaataatatgattagaagttatatcgtcgcccgacgaaaagatcagacggctagatctgtaattggtcccagtacatctatcaccgttaatgaggtaggaatgcccgcatatattagaaatacacttacagaaaagatatttgttaatgcctttacagtggataaagttaaacaactattagcgtcaaaccaagttaaattttactttaataaacgattaaaccaattaacaagaatacgccaaggaaagtttattaaaaataaaatacatttattgcctggtgattgggtagaagtagctgttcaagaatatacaagtattatttttggaagacagccgtctctacatagatacaacgtcatcgcttcatctatcagagctaccgaaggagatactatcaaaatatctcccggaattgccaactctcaaaatgctgattttgacggggatgaggaatggatgatattagaacaaaatcctaaagctgtaattgaacaaagtattcttatgtatccgacaacgttactcaaacacgatattcatggagcccctgtttatggatctattcaagatgaaatcgtagcagcgtattcattgtttaggatacaagatctttgtttagatgaagtattaaacatcttggggaaatatggaagaaagttcgatcctaaaggtaaatgtaaattcagcggtaaagatatctatacttacttgataggtgaaaagattaattatccgggtctcttaaaggatggtgagattattgcaaacgacgtagatagtaattttgttgtggctatgaggcatctgtcattggctggactcttatccgatcataagtcgaacgtggaaggtatcaactttattatcaagtcatcttatgtttttaagagatatctatctatttacggttttggggtgacattcaaagatctgagaccaaattcgacgttcactaataaattggaggccatcaacgtagaaaaaatagaacttatcaaagaagcatacgccaaatatctcaaagatgtaagagacgggaaaatagttccattatctaaagctttagaagcggactacgtggaatccatgttatccaacttgacaaattttaatatcagagagatagaagaacatatgagacaaacgctgatagatgatccagataataacctcctgaaaatggccaaagcgggttataaagtaaatcctacagaactaatgtatattctaggtacgtatggacaacagaggattgatggtgaaccagcagagactcgagtattgggtagagttttaccttactatcttccagactctaaggatccagaaggaagaggttatattcttaattctttaacaaaaggattaacaggttctcaatattacttttcgatgctggttgcaagatctcaatctactgatatcgtctgtgaaacatcacgtaccggaacactggctagaaaaatcattaaaaagatggaggatatggtggtcgacggatacggacaagtagttataggtaatacgctcatcaagtacgccgccaattataccaaaattctaggctcagtatgtaaacctgtagatcttatctatccagatgagtccatgacttggtatttggaaattagtgctctgtggaataaaataaaacagggattcgtttactctcagaaacagaaacttgcaaaaaagacattggcgccgtttaatttcctagtattcgtcaaacccaccactgaggataatgctattaaggttaaggatctgtacgatatgattcataacgtcattgatgatgtgaaagagaaatacttctttacggtatctaatatagattttatggagtatatattcttgacgcatcttaatccttctagaattagaattacaaaagaaacggctatcactatctttgaaaagttctatgaaaaactcaattatactctaggtggtggaactcctattggaattatttctgcacaggtattgtctgagaagtttacacaacaagccctgtccagttttcacactactgaaaaaagtggtgccgtcaaacaaaaacttggtttcaacgagtttaataacttgactaatttgagtaagaataagaccgaaattatcactctggtatccgatgatatctctaaacttcaatctgttaagattaatttcgaatttgtatgtttgggagaattaaatccaaacatcactcttcgaaaagaaacagataaatatgtagtagatataatagttaatagattatacatcaagagagcagaaataaccgaattagtcgtcgaatatatgattgaacgatttatctcctttagcgtcattgtaaaggaatggggtatggagacattcattgaggacgaggataatattagatttactgtctatctaaatttcgttgaaccagaggaattgaatcttagtaagtttatgatggttcttccgggggcagccaacaagggaaagattagtaaattcaagattcctatctctgactatacgggatatgacgacttcaatcaaacaaaaaagctcaataagatgactgtagaactcatgaatctaaaagaattgggttctttcgatttggagaacgtcaacgtgtatcctggagtatggaatacatacgatatcttcggtatcgaggccgctcgtgaatacttgtgcgaagccatgttaaacacctatggagaagggttcgattatctgtatcagccttgtgatcttctcgctagtttactatgtgctagttacgaaccagaatcagttaataaattcaagttcggtgcagctagtactcttaagagagctacgttcggagacaataaagcattgttaaacgcggctcttcataaaaagtcagaacctattaacgataatagtagctgccacttttttagcaaggtccctaatataggaactggatattacaaatactttatcgacttgggtcttctcatgagaatggaaaggaaactatctgataagatatcttctcaaaagatcaaggaaatggaagaaacagaagacttttaattcttatcaataacatatttttctatgatctgtcttttaaacgatggattttccacaaatgcgcctctcaagtccctcatagaatgatacacgtataaaaaatatagcataggcaatgactccttatttttagacattagatatgccaaaatcatagccccgcttctatttactcccgcagcacaatgaaccaacacgggctcgtttcgttgatcacatttagataaaaaggcggttacgtcgtcaaaatatttactaatatcggtagttgtatcatctaccaacggtatatgaataatattaatattagagttaggtaatgtatatttatccatcgtcaaatttaaaacatatttgaacttaacttcagatgatggtgcatccatagcatttttataatttcccaaatacacattattggttactcttgtcattatagtgggagatttggctttgtgcatatctccagttgaacgtagtagtaagtatttatacaaacttttcttatccatttataacgtacaaatggataaaactactttatcagtaaacgcatgtaatttagaatacgttagagaaaaggctatagtaggcgtacaagcagccaaaacatcaacacttatattctttgttattatattggcaattagtgcgctattactctggtttcagacgtctgataatccagtctttaatgaattaacgagatatatgcgaattaaaaatacggttaacgattggaaatcattaacggatagcaaaacaaaattagaaagtgatagaggtagacttctagccgctggtaaggatgatatattcgaattcaaatgtgtggatttcggcgcctattttatagctatgcgattggataagaaaacatatctgccgcaagctattaggcgaggtactggagacgcgtggatggttaaaaaggcggcaaaggtcgatccatctgctcaacaattttgtcagtatttgataaaacacaagtctaataatgttattacttgtggtaatgagatgttaaatgaattaggttatagcggttattttatgtcaccgcattggtgttccgattttagtaatatggaatagtgttagataaatgcggtaacgaatgttcctgtaaggaaccataacagcttagatttaacgttaaagatgagcataaacataataaacaaaattacaatcaaacctataacattaatatcaaacaatccaaaaaatgaaatcagtggagtagtaaacgcgtacataactcctggataacgtttagtagctgccgttcctattctagaccaaaaatttggtttcatgttttcaaagcggtgttctgcaacaagtcggggatcgtgttctacatatttggcggcattatccagtatctgcctattgatcttcatttcgttttcaattctggctatttcaaaataaaatcccgatgatagacctccagactttataatttcatctacgatgttcagcgccgtagtaactctaataatataggctgataagctaacatcataccctcctgtatatgtgaatatggcatgatttttgtccattacaagctcggttttaactttattgcctgtaataatttctctcatctgtaggatatctatttttttgtcatgcattgccttcaagacgggacgaagaaacgtaatatcctcaataacgttatcgttttctacaataactacatattctacctttttattttctaactcggtaaaaaaattagaatcccatagggctaaatgtctagcgatatttcttttcgtttcctctgtacacatagtgttacaaaaccctgaaaagaagtgagtatacttgtcatcatttctaatgtttcctccagtccactgtataaacgcataatccttgtaatgatctggatcatccttgactaccacaacatctcttttttctggcataacttcgttgtccttcacatcatcgaacttctgatcattaatatgctcatgaacattaggaaatgtttctgatggaggtctatcaataactggcacaacaataacaggagttttcgccgccgccatttagttattgaaattaatcatatacaactctctaatacgagttatattttcgtctatccattgtttcacatttacatatttcgacaaaaagatataaaatgcgtattccaatgcttctctgtttaatgaattactaaaatatacaaacacgtcactgtctggcaataaatgatatcttagaatattgtaacaatttattttgtattgcacatgttcgtgatctatgagttcttcttcgaatggcataggatctccgaatctgaaaacgtataaataggagttagaataataatatttgagagtattggtaatatataaactctttagcggtataattagtttttttctctcgatttctatttttagatgtgatggaaaaatgactaattttgtagcattagtatcatgaactctaatcaaaatcttaatatcttcgtcacacgttagctctttgaagtttttaagagatgcatcagttggttctacagatggagtaggtgcaacaattttttgttctacacatgtatgtactggagccattgttttaactataatggtgcttgtatcgaaaaactttaatgcagatagcggaagctcttcgccgcgactttctacatcgtaattgggttctaacgccgatctctgaatggatactagttttctaagttctaatgtgattctctgaaaatgtaaatccaattcctccggcattatagatgtgtatacatcggtaaataaaactatagtatccaacgatcccttctcgcaaattctagtcttaaccaagaaatcgtatataaccacggagatggcgtatttaagagtggattcttctaccgttttgttcttggatgtcatataggaaactataaagtccgcactactgttaagaatgattactaacgcaactatatagttcaaattaagcattttggaaacataaaataactctgtagacgatacttgactttcgaataagtttgcagacaaacgaagaaagaacagacctctcttaatttcagaagaaaactttttttcgtattcctgacgtctagagtttatatcaataagaaagttaagaattagtcggttaatgttgtatttcattacccaagtttgagatttcataatattatcaaaagacatgataatattaaagataaagcgctgactatgaacgaaatagctatatggttcgctcaagaatatagtcttgttaaacgtggaaacgataactgtatttttaatcacgtcagcggcatctaaattaaatataggtatatttattccacacactctacaatatgccacaccatcttcataataaataaattcgttagcaaaattattaattttagtgaaatagttagcgtcaactttcatagcttccttcaatctaatttgatgctcacacggtgcgaattccactctaacatcccttttccatgcctcaggttcatcgatctctataatatctagttttttgcgtttcacaaacacaggctcgtctctcgcgatgagatctgtatagtaactatgtaaatgataactagatagaaagatgtagctatatagatgacgatcctttaagagaggtataataactttaccccaatcagatagactgttgttatggtcttcggaaaaagaatttttataaatttttccagtattttccaaatatacgtacttaacatctaaaaaatccttaatgataataggaatggataatccgtctattttataaagaaatacatatcgcacattatacttttttttggaaatgggaataccgatgtgtctacataaatatgcaaagtctaaatattttttagagaatcttagttggtccaaattcttttccaagtacggtaatagatttttcatattgaacggtatcttcttaatctctggttctagttccgcattaaatgatgaaactaagtcactatttttataactaacgattacatcacctctaacatcatcatttaccagaatactgatcttcttttgtcgtaaatacatgtctaatgtgttaaaaaaaagatcatacaagttatacgtcatttcatctgtggtattcttgtcattgaaggataaactcgtactaatctcttctttaacagcctgttcaaatttatatcctatatacgaaaaaatagcaaccagtgtttgatcatccgcgtcaatattctgttctatcgtagtgtataacaatcgtatatcttcttctgtgatagtcgatacgttataaaggttgataacgaaaatatttttatttcgtgaaataaagtcatcgtaggattttggacttatattcgcgtctagtagatatgcttttatttttggaatgatctcaattagaatagtctctttagagtccatttaaagttacaaacaactaggaaattggtttatgatgtataatttttttagtttttatagattctttattctatacttaaaaaatgaaaataaatacaaaggttcttgagggttgtgttaaattgaaagcgagaaataatcataaattatttcattatcgcgatatccgttaagtttgtatcgtaatggcgtggtcaattacaaataaagcggatactagtagcttcacaaagatggctgaaatcagagctcatctaaaaaatagcgctgaaaataaagataaaaacgaggatattttcccggaagatgtaataattccatctactaagcccaaaaccaaacgagccactactcctcgtaaaccagcggctactaaaagatcaaccaaaaaggataaagaaaaggaggaagtggaagaagaagtagttatagaggaatatcatcaaacaactgaaaaaaattctccacctccgttatcatctcctggagtcggcgacattgtagaaagcgtggctgctgtagagctcgatgatagcgacggggatgatgaacctatggtacaagttgaagctggtaaagtaaatcatagtgctagaagcgatctttctgacctaaaggtggctaccgacaatatcgttaaagatcttaagaaaattattactagaatctctgcagtatcgacggttctagaggatgttcaagcagctggtatctctagacaatttacttctataactaaagctattacaacactatctgatctagtcaccgagggaaaatctaaagttgttcgtaaaaaagttaaaacttgtaagaagtaaatgcgtgcacttttttataaagatggtaaactctttaccgataataattttttaaatcctgtatcagatgataatccagcgtatgaggttttgcaacatgttaaaattcctactcatttaacagatgtagtagtatatgaacaaacgtgggaagaggcattaactagattaatttttgtgggaagcgattcaaaaggacgtagacaatacttttacggaaaaatgcatgtacaaaatcgcaacgctaaaagagatcgtatttttgttagagtatataacgttatgaaacgaattaattgttttataaacaaaaatataaagaaatcgtccacagattccaattatcagttggcggtttttatgttaatggaaactatgttttttattagatttggtaaaatgaaatatcttaaggagaatgaaacagtagggttattaacactaaaaaataaacacatagaaataagtcccgatgaaatagttatcaagtttgtaggaaaggacaaagtttcacatgaatttgttgttcataagtctaatagactatataagccgctattgaaactgacggatgattctagtcccgaagaatttctgttcaacaaactaagtgaacgaaaggtatatgaatgtatcaaacagtttggtattagaatcaaggatctccgaacgtatggagtcaattatacgtttttatataatttttggacaaatgtaaagtccatatctcctcttccgtcaccaaaaaagttaatagcattaactatcaaacaaactgctgaagttgtaggtcatactccatcaatttcaaaaagagcttatatggcaacgactattttagaaatggtaaaggataaaaattttttagatgtagtatctaaaactacgttcgatgaattcctatctatagtcgtagatcacgttaaatcatctacggatggatgatatagatctttacacaaataattacaagaccgataaatggaaatggataagcgtataaaatctctcgcaatgaccgctttctttggggagctaagcacattggatattatggcattgataatgtctatatttaaacgccatccaaacaataccattttttcagtggataaggatggtcagtttatgattgatttcgaatacgataattataaggcttctcaatatttggatctgaccctcactccgatatttggagatgaatgcaagactcacgcatcgagtatagccgaacaattggcgtgtgcggatattattaaagaggatattagcgaatacatcaaaactactccccgtcttaaacgatttataaaaaaataccgcaatagatcagatactcgcatcagtcgagatacagaaaagcttaaaatagctctagctaaaggcatagattacgaatatataaaagacgcttgttaataagtaaatgaaaaaaaactagtcgtttataataaaacacaatatggatgccaacatagtatcatcttctactattgcaacgtatatagacgctttagcgaagaatgcttcagaattagaacagaggtctaccgcatacgaaataaataatgaattggaactagtatttattaagccgccattaattactttgacaaatgtagtgaatatctctacgattcaggaatcgtttattcgatttaccgttactaataaggaaggtgttaaaattagaactaagattccattatctaaggtacatggtctagatgtaaaaaatgtacagttagtagatgctatagataacatagtttgggaaaagaaatcattagtgacggaaaatcgtcttcacaaagaatgcttgttgagactatcgacagaggaacgtcatatatttttggattacaaaaaatatggatcctctatccgactagaattagtcaatcttattcaagcaaaaacaaaaaactttacgatagactttaagctaaaatattttctaggatccggtgcccagtctaaaagttctttattacacgctattaatcatccaaagtcaaggcctaatacatctctggaaatagaattcacacctagagacaatgaaaaagttccatatgatgaactaataaaggaattgacgactctatcacgtcatatatttatggcttctccagagaatgtaattctttctccgcctattaacgcgcctataaaaacctttatgttgcctaaacaagatatagtaggtttggatctggaaaatctatatgccgtaactaagactgacggcattcctataactatcagagttacatcaaacgggttgtattgttattttacacatcttggttatattattagatatcctgttaagagaataatagattccgaagtagtagtctttggtgaggcagttaaggataagaactggaccgtatatctcattaagctaatagagcctgtgaatgcaatcaatgatagactagaagaaagtaagtatgttgaatctaaactagtggatatttgtgatcggatagtattcaagtcaaagaaatatgaaggtccgtttactacaactagtgaagtcgtcgatatgttatctacatatttaccaaagcaaccagaaggtgttattttgttctattcaaagggacctaaatctaacattgattttaaaattaaaaaggaaaatactatagaccaaactgcaaatgtagtatttaggtacatgtccagtgaaccaattatctttggagaatcgtctatctttgtagagtataagaaatttagcaacgataaaggctttcctaaagaatatggttctggtaagattgtgttatataacggcgttaattatctaaataatatctattgtttggaatatattaatacacataatgaagtgggtattaagtccgtggttgtacctattaagtttatagcagaattcttagttaatggagaaatacttaaacctagaattgataaaaccatgaaatatattaactcagaagattattatggaaatcaacataatatcatagtcgaacatttaagagatcaaagcatcaaaataggagatatctttaacgaggataaactatcggatgtgggacatcaatacgccaataatgataaatttagattaaatccagaagttagttattttacgaataaacgaactagaggaccgttgggaattttatcaaactacgtcaagactcttcttatttctatgtattgttccaaaacatttttagacgattccaacaaacgaaaggtattggcgattgattttggaaacggtgctgacctggaaaaatacttttatggagagattgcgttattggtagcgacggatccggatgctgatgctatagctagaggaaatgaaagatacaacaaattaaactctggaattaaaaccaagtactacaaatttgactacattcaggaaactattcgatccgatacatttgtctctagtgtcagagaagtattctattttggaaagtttaatatcatcgactggcagtttgctatccattattcttttcatccgagacattatgctaccgtcatgaataacttatccgaactaactgcttctggaggcaaggtattaatcactaccatggacggagacaaattatcaaaattaacagataaaaagacttttataattcataagaatttacctagtagcgaaaactatatgtctgtagaaaaaatagctgatgatagaatagtggtatataatccatcaacaatgtctactccaatgactgaatacattatcaaaaagaacgatatagtcagagtgtttaacgaatacggatttgttcttgtagataacgttgatttcgctacaattatagaacgaagtaaaaagtttattaatggcgcatctacaatggaagatagaccgtctacaaaaaactttttcgaactaaatagaggagccattaaatgtgaaggtttagatgtcgaagacttacttagttactatgttgtttatgtcttttctaagcggtaaataataatatggtatgggttctgatatccccgttctaaatgcattaaataattccaatagagcgatttttgttcctataggaccttccaactgtggatactctgtattgttaatagatatattaatacttttgtcgggtaacagaggttctacgtcttctaaaaataaaagtttgataacatctggcctgttcataaataaaaacttggcgattctatatatactcttattatcaaatctagccattgtcttatagatgtgagctactgtaggtgtaccatttgattttctttctaatactatatatttctctcgaagaagttcttgcacatcatctgggaataaaatactactgttgagtaaatcagttattttttttatatcgatattgatggacatttttatagttaaggataataagtatcccaaagtcgataacgacgataacgaagtatttatacttttaggaaatcacaatgactttatcagattaaaattaacaaaattaaaggagcatgtatttttttctgaatatattgtgactccagatacatatggatctttatgcgtcgaattaaatgggtctagttttcagcacggtggtagatatatagaggtggaggaatttatagatgctggaagacaagttagatggtgttctatatccaatcatatatctaaagatatacccgaagatatgcacactgataaatttgtcatttatgatatatacacttttgacgctttcaagaataaacgattggtattcgtacaggtacctccgtcgttaggagatgatagtcatttgactaacccgttattgtcaccgtattatcgtaatttagtagccagacaaatggtcaataatatgatttttaatcaagattcatttttaaaatatttattagaacatctgattagaagccactatagagtttctaaacatataacaatagttagatacaaggataccaaagaattaaatctaacgagaatatgttataatagagataagtttaaggcgtttgtattcgcttggtttaacggcgtttcggaaaatgaaaaggtactagatacgtataaaaaggtatctaatttgatataatgaatttggtgactgtatcacacgcaccatatactattacttatcataatgattgggaaccagttatgagtcaattggtagagttttataacgaagtagccagttggctgctacgagacgagacgtcgcctattcctgataagttctttatacagttgaaacaaccgcttagaaataaacgagtatgtgtgtgcggtatagatccgtatccgaaagatggaactggtgtaccgttcgaatcaccaaattttacaaaaaaatcaattaaggagatagcttcatctatatctagattaaccggagtaattgattataaaggttataaccttaatataatagacggggttataccctggaattattacttaagttgtaaattaggagaaacaaaaagtcacgcgatttactgggataaaatttctaagttactgctgcagcatataactaaacacgttagtgttctttattgtttgggtaaaacagatttctcgaatatacgggccaagttagaatccccggtaactaccatagtcggatatcatccagcggctagagaccgccaattcgagaaagatagatcatttgaaattatcaacgttttactggaattagacaacaaggcacctataaattgggctcaagggtttatttattaatgctttagtgaaattttaacttgtgttctaaatggatgcaactattagaggtaatgatgttatctttgtccttaagactataggtgtcccatcagcatgtagacaaaatgaagatccaagattcgtagaagcatttaaatgcgacgagttagaaagatatattgataataatccagaatgttcactatttgaaagtcttagggatgaggaagcatattctatagtcagaattttcatggatgtagatttagacgcgtatctagacgaaatagattatttaacggccattcaagattttattatcgaggtgtcaaactgtgtagctagattcgcgtttacagaatgcggcgccattcatgaaaatgtaataaaatccatgagatctaatttttcattgactaagtctacaaatagagataaaacaagttttcatattatctttttagatacgtataccactatggatacattgatagctatgaaacgaacactattagaattaagtagatcatctgaaaatccactaacaagatcgatagacactgccgtatataggagaaaaacaactcttcgggttgtaggtactaggaaaaatccaaattgcgacactattcatgtaatgcaaccacctcatgataatatagaagattacctattcacttacgtggatatgaacaacaatagttattacttttctctacaacaacgattggaggatttagttcctgataagttatgggaaccagggtttatttcattcgaagacgctataaaaagagtttcaaaaatattcattaattctataataaactttaatgatctcgatgaaaataattttacaacggtaccactggtcatagattacgtaacaccttgtgcattatgtaaaaaacgatcgcataaacatccgcatcaactatcgttggaaaatggtgctattagaatttacaaaactggtaatccacatagttgtaaagttaaaattgttccgttggatggtaataaactgtttaatattgcacaaagaattttagacactaactctgttttattaaccgaacgaggagaccatatagtttggattaataattcatggaaatttaacagcgaagaacccttgataacaaaactaattttgtcaataagacatcaactacctaaggaatattcaagcgaattactctgtccaagaaaacgaaagactgtagaagctaacatacgagacatgttagtagattcagtggagaccgatacctatccggataaacttccgtttaaaaatggtgtattggacctggtagacggaatgttttactctggagataatgctaaaaaatatacgtgtactgtatcaaccggatttaaatttgacgatacaaagttcgtcgaagacagtccagaaatggaagagttaatgaatatcattaacgatatccaaccattaacggatgaaaataagaaaaatagagagctatatgaaaaaacattatctagttgtttatgtggtgctaccaaaggatgtttaacattcttttttggagaaactgcaactggaaagtcgacaaccaaacgtttgttaaagtctgctatcggtgacctgtttgttgagacgggtcaaacaattttaacagatgtattggataaaggacctaatccatttatcgctaacatgcatttgaaaagatctgtattctgtagcgaactacctgattttgcctgtagtggatcaaagaaaattagatctgacaatattaaaaagttgacagaaccttgtgtcattggaagaccgtgtttctccaataaaattaataatagaaaccatgcgacaatcattatcgatactaattacaaacctgtttttgataggatagataacgcattaatgagaagaattgccgtcgtgcgattcagaacacacttttctcaaccttctggtagagaggctgctgaaaataatgacgcgtacgataaagtcaaactattagacgaggggttagatggtaaaatacaaaataatagatatagatttgcatttctatacttgttggtgaaatggtacagaaaatatcatgttcctattatgaaactatatcctacacccgaagagattcctgactttgcattctatctcaaaataggtactctgttagtatctagctctgtaaagcatattccattaatgacggacctctccaaaaagggatatatattgtacgataatgtggttactcttccgttgactactttccaacagaaaatatccaagtattttaattctagactatttggacacgatatagagagcttcatcaatagacataagaaatttgccaatgttagtgatgaatatctgcaatatatattcatagaggatatttcatctccgtaaatatatgctcatatatttatagaagatatcacatatctaaatgaataccggaattatagatttatttgataatcatgttgatagtataccaactatattacctcatcagttagctactctagattatctagttagaactatcatagatgagaacagaagcgtgttattgttccatattatgggatcaggtaaaacaataatcgctttgttgttcgccttggtagcttccagatttaaaaaggtttacattctagtgcctaatatcaacattttgaaaatttttaattataatatgggtgtagctatgaacttgtttaatgacaaattcatagctgagaatatctttattcattccacaacaagtttttattctcttaattataacgataacgtcattaattataacggattatctcgctacaataactctatttttatcgttgatgaggcacataatatctttgggaataatactggagaacttatgaccgtgataaaaaataaaaacaagattccttttttactattgtctggatctcccattactaacacacctaatactctgggtcatattatagatttaatgtccgaagagacgatagattttggtgaaattattagtcgtggtaagaaagtaattcaaacacttcttaacgaacgaggtgtgaatgtacttaaggatttgcttaaaggaagaatatcatattacgaaatgcctgataaagatctaccaacgataagatatcacggacgtaagtttctagatactagagtagtatattgtcacatgtctaaacttcaagagagagattatatgattactagacgacagctatgttatcatgaaatgtttgataaaaatatgtataacgtgtcaatggcagtattgggacaacttaatctgatgaataatttagatactttatttcaggaacaggataaggaattgtacccaaatctgaaaataaataatggcgtgttatacggagaagaattggtaacgttaaacattagttccaaatttaaatactttatcaatcggatacagacactcaacggaaaacattttatatacttttctaattctacatatggcggattggtaattaaatatatcatgctcagtaatggatattctgaatataatggttctcagggaactaatccacatatgataaacggcaaaccaaaaacatttgctatcgttactagtaaaatgaaatcgtctttagaggatctattagatgtgtataattctcctgaaaacgatgatggtagtcaattgatgtttttgttttcatcaaacattatgtccgaatcctatactctaaaagaggtaaggcatatttggtttatgactatcccagatactttttctcaatacaaccaaattcttggacgatctattagaaaattctcttacgccgatatttctgaatccgttaatgtatatcttttagccgccgtatattccgatttcaatgacgaagtgatgtcattaaacgattacacacaggatgaattgattaatgttttaccatttgacatcaaaaagctgttgtatctaaaatttaagactaaagaaacgaatagaatatactctattcttcaagagatgtctgaaacgtattctcttccaccacatccatcaattgtaaaagttttattgggagaattggtcagacaatttttttataataattctcgtattaagtataacgataccaagttacttaaaatggttacatcagttataaaaaataaagaagacgctaggaattacatagatgatattgtaaacggtcacttctttgtatcgaataaagtatttgataaatctcttttatacaaatacgaaaacgatattattacagtaccgtttagactttcctacgaaccatttgtttggggagttaactttcgtaaagaatataacgtggtatcttctccataaaactgatgagatatataaagaaataaatgtcgagctttgttaccaatggataccttccagttacattggaaccacacgagctgacgttagacataaaaactaatattaggaatgccgtatataagacgtatctccatagagaaattagtggtaaaatggccaagaaaatagaaattcgtgaagacgtggaattacctctcggcgaaatagttaataattctgtagttataaacgttccgtgtgtaataacctacgcgtattatcacgttggggatatagtcagaggaacattaaacatcgaagatgaatcaaatgtaactattcaatgtggagatttaatctgtaaactaagtagagattcgggtactgtatcatttagcgattcaaagtactgcttttttcgaaatggtaatgcgtatgacaatggcagcgaagtcactgccgttctaatggaggctcaacaaggtatcgaatctagttttgtttttctcgcgaatatcgtcgactcataaaaaagagaatagcggtaagtataaacacgaatactatggcaataattgcgaatgttttattcccttcgatatatttttgataatatgaaaaacatgtctctctcaaatcggacaaccatctcataaaatagttctcgcgcgctggagaggtagttgctgctcgtataatctccccagaataatatacttctgtgtcatcgttcaatttatacggatttctatagttctctgttatatgatgcggtttgccctcatgattagacaacgacaatagtgttctgaatttagatagttgatcagaatgaatgtttattggcgttggaaaaattatccatacagcgtctgcagagtggttgatagttgttcctagatatgtaaaataatccaacttactaggcagcaaattgtctagataaaatactgaatcaaacggtgcagacgtattggcggatctaatggaatccaattgattgactatcttttgaaaatatacatttttatgatccaatacttgtaaaaatatagaaataatgataagtccatcatcgtgtttttttgcctcttcataagaactatattttttcttattccaatgaacaagattaatctctccagagtatttgtacacatctatcaagtgattggatccataatcgtcttcctttccccaatatatatgtagtgatgataacacatattcattggggagaaaccctccacttatatatcctcctttaaaattaatccttactagttttccagtgttctggatagtggttggtttcgactcattataatgtatgtctaacggcttcaatcgcgcgttagaaattgcttttttagtttctatattaataggagatagttgttgcggcatagtaaaaatgaaatgataactgtttaaaaatagctcttagtatgggaattacaatggatgaggaagtgatatttgaaactcctagagaattaatatctattaaacgaataaaagatattccaagatcaaaagacacgcatgtgtttgctgcgtgtataacaagtgacggatatccgttaataggagctagaagaacttcattcgcgttccaggcgatattatctcaacaaaattcagattctatctttagagtatccactaaactattacggtttatgtactacaatgaactaagagaaatctttagacggttgagaaaaggttctatcaacaatatcgatcctcactttgaagagttaatattattgggtggtaaactagataaaaaggaatctattaaagattgtttaagaagagaattaaaagaggaaagtgatgaacgtataacagtaaaagaatttggaaatgtaattctaaaacttacaacacgggataaattatttaataaagtatatataggttattgcatggcgtgttttattaatcaatcgttgaaggatttatcgcatactagtatttacaatgtagaaattagaaagattaaatcattaaatgattgtattaacgacgataaatacgaatatctgtcttatatttataatatgctagttaatagtaaatgaacttttacagatctagtataattagtcagattattaagtataatagacgactagctaagtctattatttgcgaggatgactctcaaattattacactcacggcattcgttaaccaatgcctatggtgtcataaacgagtatccgtgtccgctattttattaactactgataacaaaatattagtatgtaacagacgagatagttttctctattctgaaataattagaactagaaacatgtctagaaagaaacgattatttctgaattattccaattatttgaacaaacaggaaagaagtatactatcgtcatttttttctctagatccagctactactgataatgatagaatagatgctatttatccgggtggcatacccaaaaggggtgagaatgttccagagtgtttatccagggaaattaaagaagaagttaatatagacaattcttttgtattcatagacactcggttttttattcatggcatcatagaagataccattattaataaattttttgaggtaatcttctttgtcggaagaatatctctaacgagtgatcaaatcattgatacatttaaaagtaatcatgaaatcaaggatctaatatttttagatccgaattcaggtaatggactccaatacgaaattgcaaaatatgctctagatactgcaaaactcaaatgttatggccatagaggatgttattacgaatcattaaaaaaattaactgaggatgattgattagaaaatataaattaatttaccatcgtgtatttttataacgggattgtccggcatatcatgtagatagttaccgtctacatcgtatactcgaccatctacgcctttaaatcctctatttattgacattaatctattagaattggaataccaaatattagtaccctcaattagtttattggtaatattttttttagacgatagatcgatggctcttgaaaccaaggttttccaaccggactcattgtcgatcggtgagaagtctttttcattagcatgaatccattctaatgatgtatgtttaaacactctaaacaattggacaaattcttttgatttgctttgaatgatttcaaataggtcttcgtctacagtaggcataccattagataatctagccattataaagtgcacgtttacatatctacgttctggaggagtaagaacgtgactattgagacgaatggctcttcctactatctgacgaagagacgcctcgttccatgtcatatctaaaatgaagatatcattaattgagaaaaaactaataccctcgcctccactagaagagaatacgcatgttttaatgcattctccgttagtgtttgattcttggttaaactcagccaccgccttgattctagtatcttttgttctagatgagaactctatattagagataccaaagactttgaaatatagtaataagatttctattcctgactgattaacaaatggttcaaagactagacatttaccatgggatgctaatattcccaaacatacatctataaatttgacgcttttctcttttaattcagtaaatagagagatatcagccgcactagcatcccctttcaatagttctccctttttaaaggtatctaatgcggatttagaaaactctctatctcttaatgaatttttaaaatcattatatagtgttgctatctcttgcgcgtattcgcccggatcacgattttgtctttcaggaaagctatcgaacgtaaacgtagtagccatacgtctcagaattctaaatgatgatatacctgtttttatttcagcgagtttagccttttgataaatttcttcttgctttttcgacatattaacgtatcgcattaatactgttttcttagcgaatgatgcagacccttctacgtcatcaaaaatagaaaactcgttattaactatgtacgaacataggcctcctagtttggagactaattctttctcatcaactagacgtttattctcaaatagcgattggtgttgtaaggatcctggtcgtagtaagttaaccaacatggtgaattcttgcacactattgacgataggtgtagctgataaacaaatcatcttatggttttttaacgcaatggtcttagataaaaaattatatactgaacgagtaggacggatcttaccatcttctttgattaatgatttagaaatgaagttatgacattcatcaataatgacgcatattctactcttggaattaatagttttgatattagtaaaaaatttatttctaaaattttgatcatcgtaattaataaaaatacaatccttcgttatctctggagcgtatctgagtatagtgttcatccaaggatcttctatcaaagcctttttcaccaataagataatagcccaattcgtataaatatccttaagatgtttgagaatatatacagtagtcattgttttaccgacacccgtttcatggaacaataaaagagaatgcatactgtctaatcctaagaaaactcttgctacaaaatgttgataatccttgaggcgtactacgtctgttcccatcatttcaacaggcatattagtagttctgcgcaatgcataatcgatataggccgcgtgtgatttactcatttatgagtgataagtaataactatgttttaaaaatcacagcagtagtttaactagtcttctctgatgtttgttttcgatactttttgaatcagaagtcatactagaataaagcaacgagtgaacgtaatagagagcttcgtatactctattcgaaaactctaagaacttattaatgaattccgtatccactggattgtttaaaatactaaattgaacactgttcacatccttccaagaagaagacttagtgacggacttaacatgagacataaataaatccaaattttttttacaaacatcactagccaccataatggcgctatctttcaaccagctatcgcttacgcattttagcagtctaacatttttaaagagactacaatatattctcatagtatcgattacacctctaccgaataaagttggaagtttaataatacaatatttttcgtttacaaaatcaaataatggtcgaaacacgtcgaaggttaacatcttataatcgctaatgtatagattgttttcagtgagatgattattagatttaatagcatctcgttcacgtttgaacagtttattgcgtgcgctgaggtcggcaactacggcgtccgctttagtactcctcccataatactttacgctattaatctttaaaatttcatagactttatctagatcgctttctggtaacatgatatcatgtgtaaaaagttttaacatgtcggtcggcattctatttagatcattaactctagaaatctgaagaaagtaattagctccgtattccagactaggtaatgggcttttacctagagacagattaagttctggcaatgtttcataaaatggaagaaggacatgcgttccctcccggatattttttacaatttcatccatttacaactctatagtttgttttcattattattagttattatctcccataatcttggtaatacttaccccttgatcgtaagataccttatacaggtcattacatacaactaccaattgtttttgtacataatagattggatggttgacatccatggtggaataaactactcgaacagatagtttatctttccccctagatacattagccgtaatagttgtcggcctaaagaatatctttggtgtaaagttaaaagttagggttcttgttccattattgctttttgtcagtagttcattataaattctcgagatgggtccgttctctgaatatagaacatcatttccaaatctaacttctagtctagaaataatatcggtcttattcttaaaatctattcccttgatgaagggatcgttaatgaacaaatccttggcctttgattcggctgatctattatctccgttatagacgttacgttgactagtccaaagacttacaggaatagatgtatcgatgatgttgatactatgtgatatgtgagcaaagactgttctcttagtggcatcactatatgttccagtaatggcggaaaactttttagaaatgttatatataaaagaattttttcgtgttccaaacattagcagattagtatgaagataaacactcatattatcaggaacattatcaatttttacatacacatcagcatcttgaatagaaacgataccatcttctggaacctcaacaatctcggcagactccggataaccagtcggtgggccatcactaacaataactagatcatccaacaatctactcacatatgcatctatataatctttttcatcttgtgagtaccctggatacgaaataaatttattatccgtatttccataataaggtttagtataaacagagagcgatgttgccgcatgaacttcagttacagtcgccgttggttggtttatttgacctattactctcctaggtttctctataaacgatggtttaatttgtacattcttaaccatatatccaataaagctcaattcaggaacataaacaaattctttgttgaacgtttcaaagtcgaacgaagagtcacgaataacgatatcggatactggattgaaggttaccgttacggtaatttttgaatcggatagtttaagactgctgaatgtatcttccacatcaaacggagttttaatataaacgtatactgtagatggttctttaatagtgtcattaggagttaggccaatagaaatatcattaagttcactagaatatccagagtgtttcaaagcaattgtattattgatacaattattatataattcttcgccctcaatttcccaaataacaccgttacacgaagagaccgatacgtaattaatacatttatatccaacatatggtacgtaaccgaatcttcccatacctttaacttctggaagttccaaactcagaaccaaatgattaagcgcagtaatatactgatccctaatttcgaagctagcgatagcctgattgtctggaccatcgtttgtcataactccggatagagaaatatattgcggcatatataaagttggaatttgactatcgactgcgaagacattagaccgtttaatagagtcatccccaccgatcaaagaattaatgatagtattattcattttctatttaaaatgg

SEQ ID NO: 21 - DNA, 30252 bp, Horsepox virus
ttagttattatctcccataatcttggtaatacttaccccttgatcgtaagataccttatacaggtcattacatacaactaccaattgtttttgtacataatagattggatggttgacatccatggtggaataaactactcgaacagatagtttatctttccccctagatacattagccgtaatagttgtcggcctaaagaatatctttggtgtaaagttaaaagttagggttcttgttccattattgctttttgtcagtagttcattataaattctcgagatgggtccgttctctgaatatagaacatcatttccaaatctaacttctagtctagaaataatatcggtcttattcttaaaatctattcccttgatgaagggatcgttaatgaacaaatccttggcctttgattcggctgatctattatctccgttatagacgttacgttgactagtccaaagacttacaggaatagatgtatcgatgatgttgatactatgtgatatgtgagcaaagactgttctcttagtggcatcactatatgttccagtaatggcggaaaactttttagaaatgttatatataaaagaattttttcgtgttccaaacattagcagattagtatgaagataaacactcatattatcaggaacattatcaatttttacatacacatcagcatcttgaatagaaacgataccatcttctggaacctcaacaatctcggcagactccggataaccagtcggtgggccatcactaacaataactagatcatccaacaatctactcacatatgcatctatataatctttttcatcttgtgagtaccctggatacgaaataaatttattatccgtatttccataataaggtttagtataaacagagagcgatgttgccgcatgaacttcagttacagtcgccgttggttggtttatttgacctattactctcctaggtttctctataaacgatggtttaatttgtacattcttaaccatatatccaataaagctcaattcaggaacataaacaaattctttgttgaacgtttcaaagtcgaacgaagagtcacgaataacgatatcggatactggattgaaggttaccgttacggtaatttttgaatcggatagtttaagactgctgaatgtatcttccacatcaaacggagttttaatataaacgtatactgtagatggttctttaatagtgtcattaggagttaggccaatagaaatatcattaagttcactagaatatccagagtgtttcaaagcaattgtattattgatacaattattatataattcttcgccctcaatttcccaaataacaccgttacacgaagagaccgatacgtaattaatacatttatatccaacatatggtacgtaaccgaatcttcccatacctttaacttctggaagttccaaactcagaaccaaatgattaagcgcagtaatatactgatccctaatttcgaagctagcgatagcctgattgtctggaccatcgtttgtcataactccggatagagaaatatattgcggcatatataaagttggaatttgactatcgactgcgaagacattagaccgtttaatagagtcatccccaccgatcaaagaattaatgatagtattattcattttctatttaaaatggaaaaagcttacaataaactccgtagagaaatatctataatttgtgagttttccttaaagtaacagcttccgtaaacgccgtctttatctcttagtaagtttattgtatttataaccttttccttatcttcatagaatactaaaggcaacaaagaaatttttggttcttctctaagagctacgtgagacttaaccatagacgccaacgaatccctacatattttagaacagaaatacccaacttcaccacccttgaatgtctcaatactaataggtttaaaaaccaaatcttgattacaaaaccaacacttatcaattacactatttgtcttaatagacacatctgccatagatttataatactttggtagtatacaagcgagtgcttcttctttagcgggcttaaaaactgctttaggtgctgaaataaccacatctggaaggcttactcgcttagccatttaattacggaactatttttttatacttctaatgagcaagtagaaaacctctcatctacaaaaacgtactcgtgtccataatcctctaccatagtaacacgttttttagatctcatatgtgctaaaaagttttcccatactaattggttactattatttttcgtataatttttaacagtttgaggttttagatttttagttacagaagtgatatcgaatattttatccaaaaagaatgagtaattaattgtcttagaaggagtgttttcttggcaaaagaataccaagtgcttaaatatttctactacttcattaattttttcggtactcagattcagtttctcatcttttacttgattgattatttcaaaaactaacttataatcctttttatttattctctcgttagccttaagaaaactagatacaaaatttgcatctacatcatccgtggatatttgatttttttccatgatatccaagagttccgagataatttctccagaacattgatgagacaataatctccgcaatacatttctcaaatgaataagtttattagacacgtggaagtttgactttttttgtacctttgtacatttttgaaataccgactcgcaaaaaatacaatattcatatccttgttcagatactataccgttgtgtctacaaccgctacataatcgtagattcatgttaacactctacgtatctcgtcgtccaatattttatataaaaacattttatttctagacgttgccagaaaatcctgtaatatttttagttttttgggctgtgaataaagtatcgccctaatatggttaccgtcctctgccaatatagtagttaaattatccgcacatgcaaaagaacaccgcttaggcggattcagtacaatgttatatttttcgtaccaactcatttaaatatcataatctaaaatagttctgtaatatgtctagcgctaatatattgatcataatcctgtgcataaattaagatacaacaatgtctcgaaatcatcgacatggcttcttccatagttagaagatcgtcgtcaaagttagcaacgtgattcatcaacatttgctgttttgaggcagcaaatactgaaccgtcgccattcaaccattcataaaaaccatcgtctgaatccattgataatttcttgtactggtttttgagagctcgcatcaatctagcatttctagctcccggattgaaaacagaaagaggatcgtacatccagggtccattttctgtaaatagaatcgtataatgtcccttcaagaagatatcagacgatccacaatcaaagaattggtctccgagtttgtaacagacagcggactttaacctatacatgataccgtttagcataatttctggtgatacgtcaatcggagtatcatctattagagatctaaagccggtgtaacattctccaccaaacatattcttattctgacgtcgttctacataaaacatcattgctccattaacgataacaggggaatgaacagcactacccatcacattagttcccaatggatcaatgtgtgtaactccagaacatcttccatatcctatgttaggaggagcgaacaccactcttccactattgccatcgaatgccatagaataaatatccttggaattgatagaaatcggactgtcggatgttgtaatcatcttcataggattaacaactatgtatggtgccgcctgaagtttcatatcgtaactgatgccgtttataggtctagccacagaaaccaacgtaggtctaaatccaactatagacaaaatagaagccaatatctgttcctcatctgtcataacttgagagcatccagtatgaataatcttcattagatggggatctatcgcatcatcatcgttacaataaaaaattcccattctaatgttcataattgcttttctaatcatggtatgcatgtttgctctctgaatctctgtggaaattagatctgatacacctgtaatcactatcggattatcctccgtaagacgattaaccaacaacatataattataagactttactcttctaaattcataaagttgctggattaggctataggtgtctccatgtacatacgcgttctcgagcgcaggaagtttaataccgaatagtgccatcagaataggatgaatatagtaattagtttctggttttctataaataaaagacaaatcttgtgaactagacatatcggtaaaatgcatggattggaatcgtgtagtcgacagaagaatatgatgattagatggagagtatattttatctaactctttaagttggtcaccgattctaggactagctcgagaatgaataagtactaaaggatgagtacatttcacagaaacactagcattgttcaatgtgctctttacatgggtaaggagttgaaatagctcgtttctatttgttctgacaatatttagtttattcataatgttaagcatatcctgaatagtaaagttagatgtgtcatacttgttagtagttagatatttagcaattgcattcccatcatttctcaatctcgtactccaatcatgtgtagatgctacttcatctatagaaaccatacaatcctttttggtagtttgttgagcttgatcatttcctgcacgtttaggtttggtacgttgatttctagcccctgcagatataaagtcatcgtctacaattttggataatgaattgcatacactacaagacaaagatttatcagaagtgtgaatatgatcttcatctaccaaagaaagagtttgattagtataactagattttagtcctgcgttagatgttaaaaaaacatcgctattgaccacggcttccattatttatattcgtagtttttactcgaaagcgtgattttaatatccaatcttattacttttggaatcgttcaaaacctttgactaattgtagaatttgatctattgccctacgcgtatactcccttgcatcatatacgttcgtcaccagatcgtttgtttcggcctgaagttggtgcatatctctttcaacattcgacatgagatccttaagggccatatcgtctagattttgttgagatgttgctcctggatttggattttgttgtgctgttgtacatactgtaccaccagtaggtgtaggagtacatacagtggccacaataggaggttgagaaagtgtaaccgttggagtagtacaagaaatacttccatccgattgttgtgtacatgtagttgttggtaacgtctgagaaggttgggtagatggcggcgtcgtcgttttttgatctttattaaatttagagataatatcctgaacagcattgctcggcgtcaacgctggaaggagtgaactcgccggtgcatcagtatcttcagacagccaatcaaaaagattagacatatcagatgatgtattagtttgttgtcgtggttttggtgtaggaacagtactactaggtagaagaataggagccggtgtagctgttggaaccggctgtggagttatatgaatagttggttgtagcggttggataggctgtctgctggcgaccgtcatattatctctagctagttgttctcgcaactgtctttgataatacgactcttgagactttagtactatttcaatcgcttcatcctttttcgtatccggatcctttttttcagaataatagattgacgactttggtgtagaggattctgccagcccctgtgagaacttgttaaagaagtccatttaaggctttaaaattgaattgcgattataagattaaatggcagacacagacgatattatcgactatgaatccgatgatctcaccgaatacgaggatgatgaagaagaggaagaagatggagagtcactagaaactagtgatatagatcccaaatcttcttataagattgtagaatcagcatccactcatatagaagatgcgcattccaatcttaaacatatagggaatcatatatctgctcttaaacgacgctatactagacgtataagtctatttgaaatagcgggtataatagcagaaagctataacttgcttcaacgaggaagattacctctagtttcagaattttctgacgaaacgatgaagcaaaatatgctacatgtaattatacaagagatagaggagggttcttgtcctatagtcatcgaaaagaacggagaattgttgttggtaaacgattttgacaaagatggtctaaaattccatctagactatattatcaaaatttggaaacttcaaaaacgatattagaatttatacgaatatcgttctctaaatgtcacaatcaagtctctcatattcagcaggttattgtcgtactttatatcgtgttcattaacgatattttgcaaaatagtaatgattctatcttccttcgatagatattcttcagagattattgtcttatattctttcttgttatccgatatgaatttgataagactttgaacattattaatacccgtctgtttaattttttctacagatattttagttttggcagattctattgtgtctgttaatagacatccaacatcgacattcgacgtcaattgtctataaatcagagtataaattttagaaataacattagcaaattgttgtgcgttgatgtcgttattctgaaacagtatgattttaggtagcattttcttaacaaagagaacgtatttattgttactcagttgaacagatgatatatccagattactaacgcatctgattccatataccaaactttcagaagaaatggtgtacaattgtttgtattcattcaatgtctccttttcagaaattagtttagagtcgaatactgcaataattttcaagagatagttttcatcagataagattttatttagtgtagatatgataaaactattgttttgttggagaacttgatacgccgcgttctctgtagtcgacgctctcaaatgggaaacgatctccattatttttttggaatcggatactatatcttcggtatcttgacgcagtctagtatacatagagttaagagagattagagtttgtacattaagcaacatgtctctaaatgtggctacaaacttttcctttttcacataatctagtttattatataccgatttcacaacggcaccagatttaaggaaccagaatgaaaaactctgataactacaatatttcatcatagttacgattttattatcttctatagttggtgtaatagcgcatacctttttttccaagactggaaccaacgtcataaaaatgtttaaatcaaaatccatatcaacatctgatgcgctaagaccagtctcgcgttcaagattatttttactaatggtgacgaactcatcgtatagaactctaagtttgtccattatttatttacagatttagttgtttaatttatttgtgctcttccagagttgggatagtatttttctaacgtcagtattatattattaggatctacgttcatatgtatcataatattaatcatccacgttttgataaatctatctttagcttctgaaataacgtatttaaacaaaggagaaaaatatttagctacggcatcagacgcaataacattttttgtaaatgtaacgtatttagacgacagatcttcgttaaaaagttttccatctatgtagaatccatcagttgttaacaccattcccgcgtcagattgaataggagtttgaatagtttgttttggaaatagatccttcaataacttatagttgggtgggaaaaaatcgattttatcactagactctttcttttttactatcattacctcatgaactatttcttgaatgagtatatgtattttctttcctatatcggacgcgttcattggaaaatataccatgtcgttaactataagaatatttttatcctcgtttacaaactgaataatatcagatgtagttcgtaaacgaactatatcatcaccagcacaacatctaactatatgatatccactagtttcctttagtcgtttattatcttgttccatattagcagtcattccatcatttaagaaggcgtcaaagataatagggagaaatgacattttggattctgttacaactttaccaaaattaaggatatacggacttactatctttttctcaacgtcaatttgatgaacacacgatgaaaatgtacttcgatgagattgatcatgtagaaaacaacaagggatacaatatttccgcatatcatgaaatatattaagaaatcccaccttattatatttccccaaaggatccatgcatgtaaacattatgccgttatcattaataaagacttctttctcatcggatttgtaaaagttgttactgatttttttcattccaggatctagataattaataatgatgggttttctattcttattctttgtattttggcatatcctagaccagtaaacagtttccactttggtaaaatcagcagacttttgaacgctattaaacatggcattaatggcaataactaaaaatgtaaaatatttttctatgttaggaatatggtttttcactttaatagatatatggtttttggccaaaataatagatatttttttatccgaggatagtaaaatattattagtcgccgtctctataaaaataaagctagtctcgatatccaattttattctagaattgataggagtcgccaaatgtaccttatacgttatatctcccttgatgcgttccatttgtgtatctatatcggacacaagatctgtaaatagttttacgttattaatcatcacggtatcgccgtcgctagataacgctaatgtaccatccaagtcccaaatggagagatttaactgttcatcgtttagaataaaatgattaccggtcatattaataaagtgttcatcgtatctagataacaacgacttataattaatgtccaagtcttgaactcgctgaatgatcttttttaacccagttagttttagattggtacgaaatatattgttaaactttgattctacagtaatgtccaaatctagttgtggaaatacttccatcaacattgtttcaaacttgataatattattatctacatcttcgtacgatccaaattccggaatagatgtatcgcacgctctggccacccagataaccaaaaagtcacacgctccaggatatacattgtataaaaagctatcgttttttagtagtgtttttttctgagtatatacgaagggattaaaaatagtattatcaacgtaactatattccaaattattcttatgagaatagataataatatcgtccttaatatctaacaaatttcctaaatatccctttaattgagtcattcgaagcgtcaatagaatatgtctcttaactatttccggctgttgtatatttaaatgacttcgtaaaaaataatatatgggcgacttctcatctatgtaatcatatggagtgagatatagggctcgttctacctcctgccccttacccacctgtaataccaattgcggacttactatatatcgcatatttatatcgtggggtaaagtgaaaatctactaccgatgatgtaagtcttacaatgttcgaaccagtaccagatcttaatttggaggcctccgtagaactaggggaggtaaatatagatcaaacaacacctatgataaaggaaaatagcggttttatatcccgtagtagacgtctatttgcccatagatctaaggatgatgagagaaaactagcactacgattctttttacaaagactttattttttagatcatagagagattcattatttgttcagatgcgttgacgctgtaaaagacgtcactattaccaaaaaaaataacattatcgtggcgccttatatagcacttttaactatcgcatcaaaaggatgcaaacttacagaaacaatgattgaagcattctttccagaactatataatgaacatagtaagaaatttaaattcaactctcaagtatccatcatccaagaaaaactcggataccagtttggaaactatcacgtttatgattttgaaccgtattactctacagtagctctggctattcgagatgaacattcatctggcatttttaatatccgtcaagagagttatctggtaagttcattatctgaaataacatatagattttatctaattaatctaaaatctgatcttgttcaatggagtgctagtacgggcgctgtaattaatcaaatggtaaatactgtattgattacagtgtatgaaaagttacaactggtcatagaaaatgattcacaatttacatgttcattggctgtggaatcagaacttccaataaaattacttaaagatagaaatgaattatttacaaaattcattaacgagttaaaaaagaccagttcattcaagataagcaaacgcgataaggatacgctattaaaatattttacttaggactagagttagaatttatagacgactcatttcgtttatcattattactattattactaccatcattattagtattcttcttgttatcttgttcagaaatatacagcaatgctatgcctaatactaaatacattatcatgcttgcaatggctctaacaacgacgaaccaaaatgaatttggtcgtagcttttgttcacaaaaatacataaagaaatgtctacataaatctatggcgctattggctacttgaaatagcgccagtcctcctacagattttaatatagctgtataacatgacatttattcatcatcaaaagagacagagtcaccatctgtcatatttagattttttttcatgtgttcaaagtatcctctactcatttcattataatagtttatcatacttagaattttaggacggatcaatgagtaagacttaactagatcgtcagtagtaatttgtgcatcgtctattctgcatccgcttcgtcgaataatgtatagcatcgctttgagattctccatagctatcaagtctttatacaatgacatggaaatatctgtgaatactttatacttctccaacatcgatgccttaacatcatcgcctactttagcattgaaaatacgttctattgtgtagatggatgtaacaagatttttaaacaacaatgccattttacacgatgattgtctcaagtctccaatcttttgtttagaacgattagctacagagttcaacgcttggctgactagcatattattatctttagaaattgtattcttcaatgaagcgtttatcatatctgtgatttcgttagtcatattacagtctgactgggttgtaatgttatccaacatatcacctatggatacggtacacgtaccagcatttgtaataatcctatctaagatgttgtatggcattgcgcagaaaatatcttctcctgtaatatctccactctcgataaatctactcagattattcttaaatgccttattctctggagaaaagatatcagtgtccatcatttcattaatagtatacgcagaaaagataccacgagtatcaattctatccaagatacttatcggttccgagtcacagataatggtttcctctccttcgggagatcctgcatagaaatatctaggacaatagtttctatactgtctgtaactctgataatctctaaagtcactaactgataccatgaaattgagaagatcaaacgctgaagtaattaatttttctgcctcgtttttactacaactagttttcatcaatgtagtgacgatgtattgtttagttactcttggtctaatactgatgatagagatattattacttcccataatggatcttctagtagtcaccttaaagcccattgatgcaaatagcagatagataaagtcttggtatgactcctttctaatatagtacggactacctttgtcacccaactttatacccacataagccataacaacctctttaatagccgtttcatgaggtttatcagccatgagcctgagtagttggaagaatctcatgaatcccgtctcagaaagtcctatatgcatgatagatttatctttcctgggaaactctcgtatagtcatagatgaaatactcttcaaagtttctgaaataagattagtaacagtcttacctccgactactctaggtaacaaacaaactctaataggtgttttctctgcggagataatatcagaaaggatagagcaataagtagtattattgtgattataaagaccgaatacataacaggtagaatttataaacatcatgtcctgaaggtttttagacttgtattcctcgtaatccataccgtcccaaaacatggatttggtaactttgatagccgtagatctttgttccttcgccaacaggttaaagaaattaataaagaatttgtggtttctacctatgtctacaaattgcacgtttggaagcgtaactgttacgttcactgcagcattttgaggatttcgagtatgaagtacgatgttattgtttactggtatatctggaaagaattctaccagtctaggaataagagattgatatcgcatagaaatacaaaagttcataatctcatcatcgaagagcattttgttaccattgtaataaatatccactctgtcatatgtataaatgaagtactgttcaaacatgatgagatgtttatatgttggcatagtagtgagatctacgtttggtaatggtaatgtattaagattaactccataatgtctagcagcatctgcgatgttataagcgtcgtcaaagcggggtcgatcttgtattgttatatattgtctaacacctataagattatcaaaatcttgtctgcttaatacaccgttaacaatttttgccttgaattcttttattggtgcattaataacatccttatagaggatgttaaacaaataagtgttatcaaagttaagatctggatatttcttttctgctagaacatccattgagtcggagccatctggtttaatataaccaccgataaatctagctctgtattctgtatccgtcaatctaatattaagaaggtgttgagtgaaaggtggaagatcgtaaaagctgtgagtattaatgataggattagtttccgaactaatgttaattggggtattaataatatctatatttccagcgttaagtgtaacattaaacagttttaattcacttgacgtggtatcaattaaataattaatgcccaatttggatatagcagcctgaagctcatcttgtttagttacggatcctaatgagttattaagcaatatatcgaacggatgaacgaaggttgttttaagttggtcacatactttgtaatctagacatagatgcggaagaacggtagaaactatacgaaataaatattcagagtcctctaattgatcaagagtaactattgacttaataggcatcatttatttagtattaaatgacgaccgtaccagtgacggatatacaaaacgatttaattacagagttttcagaagataattatccatctaacaaaaattatgaaataactcttcgtcaaatgtctattctaactcacgttaacaacgtggtagatagagaacataatgccgccgtagtgtcatctccagaggaaatatcctcacaacttaatgaagatctatttccagatgatgattcaccggccactattatcgaacgagtacaacctcatactactattattgacgatactccacctcctacttttcgtagagagttattaatatcggaacaacgtcaacaacgagaaaaaagatttaatattacagtatcgaaaaatgctgaagcaataatggaatctagatctatgataacttctatgccaacacaaacaccatccttgggagtagtttatgataaagataaaagaattcagatgttagaggatgaagtggttaatcttagaaatcaacgatctaatacaaaatcatctgataatttagataattttaccaaaatactatttggtaagactccgtacaaatcaacagaagttaataagcgtatagctatcgttaattatgcaaatttgaacgggtcccccttatcagttgaggacttggatgtttgttcggaggatgaaatagatagaatctataaaacgattaaacaatatcacgaaagtagaaaacgaaaaattatcgtcactaacgtgattattattgtcataaacattatcgagcaggcattgctaaaactcggatttgaagaaatcaaaggactgagtaccgatatcacttcagaaattatcgatgtggagatcggagatgactgcgatgctgtagcatctaaactaggaatcggtaacagtccggttcttaatattgtattgtttatactcaagatattcgttaaacgaattaaaattatttaatttaatacattcccatatccagacaacaatcgtctggattaatctgttcctgtcgtctcataccggacgacatattaatctttttattagtgggcatctttttagatggtttctttttcccagcattaactgattcgatacctaaaagatcgtgattgatctctccgaccattccacgaacttctaattggccgtctctaacggtaccataaactattttaccagcattagtaacagcttggacaatctgaccatccattgcgttgaatgatgtagttgctgttgttctacgtctaggagcaccagaagtatttttggagcccttggaggctgatgtagaagaagacgaggattttgattttggtttacatgtaatacattttgaactctttgattttgtatcacatgcgccggcagtcacatctgtttgagaattaagattattgttgcctcctttgacggctgcatctccaccgatttgcgctagtagatttttaagctgtggtgtaatcttattaactgtttcgatataatcatcgtaactgcttctaacggctaaattttttttatccgccatttagaagctaaaaatatttttatttatgcagaagatttaactagattatacaatgaactaatatgatccttttccagattatttacaaacttggtatttcttggttctggaggaggcgaatttaaattcggacttggatttggattttgtgggttcttgatcttattatacagcgcatataggatggcgacggtaactgctacgcaaataccgatcaacaaaagaataccaatcatttattgacaataacttcactattgatcaagtatgcaatatatcatcttttcactaaataagtagtaataatgattcaacaatgtcgagatatatggacgataataatttagttcatggaaatatcgctatgattggtatgaatgactccactaactctgtggggcgcgcagtgctttccccacatagaataaattagcattccgactgtgataataataccaagtataaacgccataatactcaatactttccatgtacgagtgggactggtagacttactaaagtcaataaaggcgaagatacacgaaagaatcaaaagaatgattccagcgattagcacgccggaaaaataatttccaatcataagcatcatgtccatttaactaataaaaattttaaatcaccgaatgaacaaagtggaatataaaccatataaaaacaatagtttgtactgcaaaaataatatctatttttgttttcgaagatatggtaaaattaaatagtagtacacagcatgttataactaacagcagcaacggctcgtaattacttatcatttactagacgaaaaggtggtgggatattttcttgctcaaataatacaaatatatcacccatccattttatgcgatgtttatatactctaatctttaatagatctatagacgacgggtttaccaacaatatagattttatcgattcatctaatttaaacccttccttaaacgtgaatgatctattatctggcataacgatgactctacctgatgaatcggacaatgtactgggccatgtagaataaattatcaacgaattatcgtctacgaacatttatatcatttgttttaattttagtacgcgaataaatagatataaaatagaaaataacagatattacaaccaatgttatggccgcgcccaaccaggtaggcagttttattttatcttttactacaggttctcctggatgatgtacgttaccaactgcagacgtagttctagtacaattagacgtaagttccgcttgggaattttttaacgctaaagagttaacgttaatcgtacacccaacgtatttacatctagttctttgaacatcttgattataatataaccattttctatctctagattcgtcagtgcactcatgtaaccaacataccctaggtcctaaatatttatctccggaattagattttggataattcgcgcaccaacaatttctatttcctttatgatcgttacaaaagacgtataatgccgtatccccaaaagtaaaataatcaggacgaataattctaataaactcagaacaatatctcgcatccatatgtttggagcaaatatcggaataagtagacatagccggtttccgttttgcacgtaaccattctaaacaattggggtttccaggatcgtttctacaaaatccagtcatgaaatcatcacaatgttctgtcttgtaattattattaaatatttttggacagtgtttggtatttgtcttagaacaacattttgccacgctatcactatcgcccaggagataatccttttttataaaatgacatcgttgcccggatgctatataatcagtagcgtgttttaaatccttaatatattcaggagttacctcgttctgataatagattaatgatccaggacgaaatttgaaagaactacatggttctccatgaattaatacatattgtttagcaaattcaggaactataaaactactacaatgatctattgacataccatctatcaaacaaaatttgggtttaatttctcctggagacgtttcataataatacatataactttcttcggcaaacttaacagctctattatattcaggataattaaaacctaattccatatatttgtctcgtatatctgctattcctggtgctattttaattctattaagagtaacggctgcccccatttttaataatcgtcagtatttaaactgttaaatgttggtatatcaacatttaccttatttcccgcagtataaggtttgttgcaggtatactgttcaggaatggttacatttatacttcttctatagtcctgtctttcgatgttcatcacatatgcaaagaacagaataaacaaaataatgtaagaaataatattaaatatctgtgaatttgtaaatacattgattgccataataattacagcagctacaatacatacaatagacattcccacagtgttgccattacctccacgatacatttgagttactaagcaataggtaataactaagctagtaagaggcaatagaaaagatgagataaatatcatcaatatagagattagaggagggctatatagagccaagacgaacaaaatcaaaccgagtaacgttctaacatcattatttttgaagattcccaaataatcattcattcctccataatcgttttgcatcatacctccatctttaggcataaacgattgctgctgttcctctgtaaataaatctttatcaagcactccagcacccgcagagaagtcgtcaagcatattgtaatatcttaaataactcatttatatattaaaaaatgtcactattaaagatggagtataatctttatgccgaactaaaaaaaatgacttgtggtcaacccctaagtctttttaacgaagacggggattttgtagaagttgaaccgggatcatcctttaagtttctgatacctaagggattttacgcctctccttccgtaaagacgagtctagtatttgaaacattaacaacgaccgataataaaattactagtatcaatccaacaaatgcgccaaagttatatcctcttcaacgcaaagtcgtatctgaagtagtttctaatatgaggaaaatgatcgaatcaaaacgtcctctatacattactcttcacttggcgtgtggatttggtaagactattaccacgtgttatcttatggctacacacggtagaaaaaccgtcatttgcgtacccaataaaatgttaatacatcaatggaagacacaggtagaggcagtcggattggaacataagatatccatagatggagtaagtagtctattaaaggaactaaagactcaaagtccggatgtattaatagtagtcagtagacatctgacaaacgatgccttttgtaaatatatcaataagcattatgatttgttcatcttggatgaatcacatacgtataatctgatgaacaatacagcagttacaagatttttagcgtattatcctccgatgatgtgttattttttaactgctacacctagaccatctaacagaatttattgtaacagtattattaatattgccaagttatccgatctaaaaaaaactatctatgcagtagatagtttttttgagccatattccacagataatattagacatatgataaaacgattagatggaccatctaataaatatcatatatatactgagaagttattatctgtagacgagcctagaaatcaacttattcttgataccctggtagaagaattcaagtcaggaactattaatcgaattttagttattactaaactacgtgaacatatggtatttttctacaaacgattattagattttttcggatcagaggttgtatttataggagacgcccaaaatagacgtactccagatatggtcaaatcaatcaaggaactaaatagatttatattcgtatccaccttattttattccggtactggtttagatattcctagtttggattcgttgttcatttgctcggcagtaatcaacaatatgcaaatagagcaattactagggagggtatgtcgagaaacagaactattagataggacggtatatgtatttcctaacacatccatcaaagaaataaagtacatgataggaaatttcatgcaacgaattattagtctgtctgtagataaactaggatttaaacaagaaagttatcggaaacatcaagaatccgattccacttctgtatgtacaacatcctccagagaagaacgtgtattaaatagaatatttaactcgcaaaatcgttaagaagtttaagcgacgatccgcatgctgcgcaggccagtgtattacccctcatagtattaatataatccaatgatacttttgtgatgtcggaaatcttaaccaatttagactgacaggcagaacacgtcatgcaatcatcatcgtcatcgataactgtagtcttgggcttctttttgcggctcttcattccggaacgcacattggtgctatccatttaggtagtaaaaaataagtcagaatatgccctatagcacgatcgtgcaaaacctggtatatcgtctctatctttatcacaatatagtgtatcgacatttttattattattgacctcgtttatcttggaacatggaatggaaacatttttgttatcaacggccacttttgccttaattccagatgttgtaaaattataactaaacagtctatcatcgacacaaatgaaattcttgtttagacgtttgtagtttacgtatgcggctcgttcgcgtctcattttttcagatattgcaggtactataatattaaaaataagaatgaaataacataggattaaaaataaagttatcatgacttctagcgctgatttaactaacttaaaagaattacttagtctgtacaaaagtttgagattttcagattctgcggctatagaaaagtataattctttggtagaatggggaacatctacttactggaaaataggcgtgcaaaaggtagctaatgtcgagacgtcaatatctgattattatgatgaggtaaaaaataaaccgtttaatattgatccgggatattacattttcttaccgctatattttggaagcgtctttatttattcgaagggtaaaaatatggtagaacttggatctggaaactcttttcaaataccagataatatgcgaagtgcgtgtaacaaagtattagatagtgataacggaatagactttctgagatttgttttgttaaacaatagatggataatggaagatgctatatcaaaatatcagtctccagttaatatatttaaactagctagtgagtacggattaaacatacccaaatatttagaaattgaaatagaggaagacacattatttgacgacgagttatactctattatagaacgctcttttgatgataaatttccaaaaatatccatatcgtatattaagttgggagaacttaggcggcaagttgtagactttttcaaattctcattcatgtatattgagtccatcaaggtagatcgtataggagataatatttttattcctagcgttataacaaaattaggaaaaaagatattagtaaaagatgtagaccatttaatacgatctaaggttagagaacatacatttgtaaaagtaaaaaagaaaaacacattttccattttatacgactatgatgggaacggaacagaaactagaggagaagtaataaaacgaattatagacactataggacgagactattatgttaacggaaagtatttctctaaggttggtagtgcaggcttaaagcaattgactaataaattagatattaatgagtgcgcaactgtcgatgagttagttgatgagattaataaatccggaactgtaaaacgaaaaataaaaaaccaatcagcatttgatttaagcagagaatgtttgggatatccagaagcggattttataacgttagttaataacatgcggttcaaaatagaaaattgtaaggttgtaaatttcaatattgaaaatactaattgtttaaataacccgagtattgaaactatatatagaaactttaaccagttcgtctcaatctttaatgtcgtcaccgatgtcaaaaaaagattattcgagtgaaataatatgcgcctttgatataggtgcaaaaaatcctgccagaactgttttagaagtcaaggataactccgttagggtattggatatatcaaaattagactggagttctgattgggaaaggcgcatagctaaagatttgtcacaatatgaatacactacagttcttctagaacgtcagcctagaaggtcgccgtatgttaaatttatctattttattaaaggctttttatatcatacatcggctgccaaagttatttgcgtctcgcctgtcatgtctggtaattcatatagagatcgaaaaaagagatcggtcgaagcatttcttgattggatggacacattcggattgcgagactccgttccggatagacgcaaattagacgatgtagcggatagtttcaatttggctatgagatacgtattagataaatggaatactaattatacaccttataataggtgtaaatctagaaattacataaaaaaaatgtaataacgttagtaacgccattatggataatctatttacctttctacatgaaatagaagatagatatgccagaactatttttaactttcatctaataagttgcgatgaaataggagatatatatggtcttatgaaagaacgaatttcctcagaggatatgtttgataatatagtgtataataaagatatacatcatgccattaagaaactagtgtattgcgacatccaacttactaaacacattattaatcagaatacgtatccggtatttaacgattcttcacaagtgaaatgttgtcattatttcgacataaactcagataatagcaatattagctctcgtacagtagagatatttgagagggaaaagtcatctcttgtatcatatattaaaactaccaataagaagagaaaggtcaattacggcgaaataaagaaaactgttcatggaggcactaatgcaaattacttttccggtaaaaagtctgacgagtatctgagtactacagttagatccaacattaatcaaccttggatcaaaaccatctctaagaggatgagagttgatatcattaatcactctatagtaacgcgtggaaaaagctctatattacaaactatagaaattatttttactaatagaacatgtgtgaaaatattcaaggattctactatgcacattattctatccaaggacaaggatgaaaaggggtgtatacacatgattgacaaattattctatgtctattataatttatttctgttgttcgaggatatcatccaaaacgagtactttaaagaagtagctaatgttgtaaaccacgtactcacggctacggcattagatgagaaattattcctaattaagaaaatggctgaacacgatgtttatggagttagcaatttcaaaatagggatgtttaacctgacatttattaagtcgttggatcataccgttttcccctctctgttagatgaggatagcaaaataaagttttttaaggggaaaaagctcaatattgtagcattacgatctctggaggattgtataaattacgtgactaaatccgagaatatgatagaaatgatgaaggaaagatcgactattttaaatagcatagatatagaaacggaatcggtagatcgtctaaaagaattgcttctaaaatgaaaaaaaacactgattcagaaatggatcaacgactagggtataagtttttggtgcctgatcctaaagccggagttttttatagaccgttacatttccaatatgtatcgtattctaattttatattgcatcgattgcatgaaatcttgaccgtcaagcggccactcttatcgtttaagaataatacagaacgaattatgatagaaattagcaatgttaaagtgactcctccagattactcacctataatcgcgagtattaaaggtaagagttatgacgcattagccacgttcactgtaaatatctttaaagaggtaatgaccaaagagggtatatccatcactaaaataagtagttatgagggaaaagattctcatttgataaaaattccgctactaataggatacgggaataaaaatccacttgatacagccaagtatcttgttcctaatgtcataggtggagtctttatcaataaacaatctgtcgaaaaagtaggaattaatctagtagaaaagattacaacatggccaaaatttagggttgttaagccaaactcattcactttctcgttttcctccgtatcccctcctaatgtattaccgacaagatatcgccattacaagatatctctggatatatcacaattggaagcgttgaatatatcatcgacaaagacatttataacggtcaatattgttttgctgtctcaatatttatctagagtgagtctagaattcattagacgtagtttatcatacgatatgcctccagaagttgtctatctagtaaacgcgataatagatagtgctaaacgaattactgaatctattactgactttaatattgatacatacattaatgacctggtggaagctgaacacattaaacaaaaatctcagttaacgatcaacgagttcaaatatgaaatgctgcataactttttacctcatatgaactatacacccgatcaactaaagggattttatatgatatctttactaagaaagtttctctactgtatctaccacacttctagatatccagatagagattcgatggtttgtcatcgcatcctaacgtacggcaaatattttgagacgttggcacatgatgaattagagaattacataggcaacatccgaaacgatatcatgaacaatcacaagaacagaggcacttacgcggtaaacattcatgtactaacaactcccggacttaatcacgcgttttctagcttattgagtggaaagttcaaaaagtcagacggtagttatcgaacacatcctcactattcatggatgcagaatatttctattcctagaagtgttggattttatccggatcaagtaaagatttcaaaaatgttttctgtcagaaaataccatccaagtcaatatctttacttttgttcatcggacgttccggaaagaggtcctcaggtaggtttagtatctcaattgtctgtcttgagttccattacaaatatactaacgtctgagtatttggatttggaaaagaaaatttgtgagtatatcagatcatattataaagatgatataagttactttgaaacaggatttccaatcactatagaaaatgctctagttgcttctcttaatccaaatatgatatgtgattttgtaactgactttaaacgtagaaaacggatgggattcttcggtaacttggaggtaggtattactttagttagggatcacatgaatgaaattcgcattaatattggagcaggaagattagtcagaccattcttggttgtggataacggagagctcatgatggatgtgtgtccggagttagaaagcagattagacgacatgacattctctgacattcagaaagagtttccgcatgtcatcgaaatggtagatatagaacaatttacttttagtaacgtatgtgaatcggttcaaaaatttagaatgatgtcaaaggatgaaagaaagcaatacgatttatgtgactttcctgccgaatttagagatggatatgtagcatcttcactagtgggaatcaatcacaattctggacccagagctattcttggatgtgctcaagctaaacaagctatctcttgtctgagttcggatatacgaaataaaatagacaatggaattcatttgatgtatccagagaggccaattgtcattagtaaggctttagaaacttcaaagattgcggctaattgcttcggacaacatgttactatagcattaatgtcgtacaaaggtatcaatcaagaggatggaattatcatcaaaaaacaatttattcagagaggcggtctcgatattgttacagccaagaaacatcaagtagaaattccattggaaaactttaataacaaagaaagagataggtctaacgcctattcaaaattagaaagtaatggattagttagactgaatgctttcttggaatccggagacgctatggcacgaaatatctcatcaagaactcttgaagatgattttgctagagataatcagattagctttgatgtttccgaaaaatataccgatatgtacaaatctcgcgttgaacgagtacaagtagaacttactgacaaagttaaggtacgagtattaaccatgaaagaaagaagacccattctaggagacaaatttaccactagaacgagtcaaaagggaacagtcgcgtatgtcgcggatgaaacggaacttccatacgacgaaaatggtatcacaccagatgtcattattaattctacatccatcttctctagaaaaactatatctatgttgatagaggttattttaacagccgcatattctgctaagccgtacaacaataagggagaaaaccgacctgtctgttttcctagtagtaacgaaacatccatcgatacatatatgcaattcgctaaacaatgttatgagcatttaaattcgaaattgtccgatgaagaattgtcggataaaatcttttgtgaaaagattctctatgatcctgaaacggataagccttatgcatccaaagtattttttggaccaatttattacttgcgtctgagacatttaactcaggacaaggcaaccgttagatgtagaggtaaaaagacgaagctcattagacaagcgaatgagggacgaaaacgtggaggaggtattaagtttggagaaatggagagagactgtttaatagcgcatggcgcagccaatactattacagaagttttaaaagactcagaagaggattatcaagatgtgtatatttgtgaaaattgtggagacatagcagcacaaatcaaaagtattaatacatgtcttagatgttcaaaacttaatctctctcctctcttaacaaaaattgataccacgcacgtatctaaagtatttcttactcaaatgaacgccagaggcgtaaaagttaaattagatttcgaacgaaggcctccttcgttttataaaccattagataaagttgatctcaagccgtcttttctggtgtaatattctagtttggtagtagatacatatcaatatcatcaaattcgagatccgaattataaaatgggcgtggattgttaactatagaatcggtcgttatttcgtcggacgtctgatattcggaaatctgtggagtttcaggttttggtggaggtgtaactgctacttgggatactgaagtctgatattcagaaagctgggggatgttctggttcgacatccaccgatggtgtcacatcactaatcggtttggtaacgtctgtggatggaggtgctacttctacagaacctgtagcctcagttgtcaacggagatacattttcaatgcaaggaaatgtataatttggtaatggtttctcatgtggatctgaagaagaggtaagatatctactagaaagataccgatcacgttctagttctcttttgtagaacttaactttttctttctcagcatctagttgatattccaacctcttcacgttactacgttcagatttcaattcacgttcgcatgggttacctccgcagtttttacgagcgatttcacgttccagatcacgttcagccttcatgcgtctctccctctctctatcgagtttatcagagcagtctttctgaaggcgatcgaactccataaatttctccaacgctttgattgtttccatagatttccgaagttcagcttttaggactgtgattctttttcttttgaattcacagctggatgtacaaccgtttcctccgtttccattaccgccatctctaagtttcttttctagatcggcaatctttctcaacatttcatccccatgccttttacattcctcgagtctactgtcgtcgaaatatcgttccagctccttttcgacatcaataactttagcacgttgtctctcaagctctcttttgtagtaactatcatttttatctgattccctggcacgtttaagatcttcatgcaattgagtcagctcttaacacaatctcttaacttcctctcttgcttcttcgtcatagtacttacaatcactatgggatccattgttaccacgtctacactcggcgagctcgcgtttaagagattcaattttccgtttgtattggtccatgtctccattgctaccaccattagatttacaggctgctagttgtcgttcgagatcagaaatacgggttttcttgaattgatttcgtcgatgtacttggcatgattggcatcgaaacacttattaagttctttttccaattctacgattttatttctttcgcaagtcaattccctcctgtagtaactatctgttttgttagattcacgctctctacgtagactttcttgcaagttactaatttgttccctagcacgtccgagttcagttttatatgccgaatagagttctgattcatcctttgagcagatctctagcgatcgtttaagattcctgattctagtctttagcctatttacctcctcagaagatgttccgttaccgttgcgtttacactcgttaagctgtctatcaagatccatgattctatctctaagacgttgcatctctctttccatatcagcattgctttcattattacgtctgcagtcactcaactgtctttcaatatctgagattctatctctaagacgtcgcatctctctctgtttcggcattggtttcattattacgtctacagtcgttcaactgtctttcaagatctgatattctagattggagtctgctaatctctgtagcattttcacggcattcactcagttgtctttcaagatctgagattctagattggagtctgctaatctctgtaagatttcctcctccgctctcgatgcagtcggtcaacttattctctagttctctaatacgcgaacgcagtgcatcaacttcttgcgtgtcttcctggttgcgtgtacattcatcgagtctagattcgagatctctaacgcgtcgtcgttcttcctcaagttctctgcttactacagaaagcgtgtccctatcttgttgatatttagcaatttctgattctagagtactgattttgcttacgtagttactaatatttgtcttggccttatcaagatcctccttgtatttgtcgcattccttgatatccctacgaagtctggacagttcccattcgacattacgacgtttatcgatttcagctcggagatcgttatcgcgttgttttagccacatacgactgagttcaagttctcgttgacaagatccatctacttttccattcctaatagtatccagttccttttctagttctgaacgcatttctcgttccctatcaagcgattctctcaattctcggatagtcttcttatcaatttctaataaatctgaaccatcatctgtcccattttgaatatccctgtgttctttgatctcttttgtaagtcggtcgattctttcggttttataaacagaatccctttccaaagtcctaatcttactgagtttatcactaagttctgcatttaattcggtgagttttctcttggcttcttccaactctgttttaaactctccactatttccgcattcttcctcgcatttatctaaccattcaattagtttattaataactagttggtaatcagcgattcctatagccgttcttgtaattgtgggaacataattaggatcttctaatggattgtatggcttgatagcatcatctttatcattattagggggatggacaaccttaattggttggtcctcatctcctccagtagcgtgtggttcttcaataccagtgttagtaataggcttaggcaaatgcttgtcgtacgcgggcacttcctcatccatcaagtatttataatcgggttctacttcagaatattcttttctaagagacgcgacttcgggagttagtagaagaactctgtttctgtatctatcaacgctggaatcaatactcaagttaagaatagcgaatacctcatcgtcatcatccgtatcttctgaaacaccatcatatgacatttcatgaagtctaacgtattgataaatagaatcagatttagtattaaacagatccttaacctttttagtaaacgcatatgtatattttagatctccagatttcataatatgatcacatgccttaaatgtcagtgcttccatgatataatctggaacactaatgggtgacgaaaaagatacagcaccatatgctacgttgataaataaatctgaaccactaagtagataatgattaatgttaaggaagaggaaatattcagtatatagatatgccttagcatcatatcttgtactaaacacgctaaacagtttattgatgtgatcaatttccaacagaataattagagcagcgggaataccaacaaacatattaccacatccgtattttctatgaatatcacatattatgttaaaaaatcttgatagaagagcgaatatctcgtctgacttaatgagacgtagttcagcagcagcataagtcataactgtaaatagaacatactttcctgtagtgttgattctagactccacatcaacaccattattaaaaatagttttatatacatctttaatctgctctccgttaatcgtcgaacgttctagtatacggaaacactttgatttcttatctgtagttaatgacttagtgatatcacgaagaatattacgaattacatttcttgtttttcttgagagacctgattcaaaactcaactcatcgttccatagtttttttacctcagtggcgaaatctttggagtgcttggtacatttttcaataaggttcgtgacctccat

SEQ ID NO: 22 - DNA, 30000 bp, Horsepox virus
ctaagacgtcgcatctctctctgtttcggcattggtttcattattacgtctacagtcgttcaactgtctttcaagatctgatattctagattggagtctgctaatctctgtagcattttcacggcattcactcagttgtctttcaagatctgagattctagattggagtctgctaatctctgtaagatttcctcctccgctctcgatgcagtcggtcaacttattctctagttctctaatacgcgaacgcagtgcatcaacttcttgcgtgtcttcctggttgcgtgtacattcatcgagtctagattcgagatctctaacgcgtcgtcgttcttcctcaagttctctgcttactacagaaagcgtgtccctatcttgttgatatttagcaatttctgattctagagtactgattttgcttacgtagttactaatatttgtcttggccttatcaagatcctccttgtatttgtcgcattccttgatatccctacgaagtctggacagttcccattcgacattacgacgtttatcgatttcagctcggagatcgttatcgcgttgttttagccacatacgactgagttcaagttctcgttgacaagatccatctacttttccattcctaatagtatccagttccttttctagttctgaacgcatttctcgttccctatcaagcgattctctcaattctcggatagtcttcttatcaatttctaataaatctgaaccatcatctgtcccattttgaatatccctgtgttctttgatctcttttgtaagtcggtcgattctttcggttttataaacagaatccctttccaaagtcctaatcttactgagtttatcactaagttctgcatttaattcggtgagttttctcttggcttcttccaactctgttttaaactctccactatttccgcattcttcctcgcatttatctaaccattcaattagtttattaataactagttggtaatcagcgattcctatagccgttcttgtaattgtgggaacataattaggatcttctaatggattgtatggcttgatagcatcatctttatcattattagggggatggacaaccttaattggttggtcctcatctcctccagtagcgtgtggttcttcaataccagtgttagtaataggcttaggcaaatgcttgtcgtacgcgggcacttcctcatccatcaagtatttataatcgggttctacttcagaatattcttttctaagagacgcgacttcgggagttagtagaagaactctgtttctgtatctatcaacgctggaatcaatactcaagttaagaatagcgaatacctcatcgtcatcatccgtatcttctgaaacaccatcatatgacatttcatgaagtctaacgtattgataaatagaatcagatttagtattaaacagatccttaacctttttagtaaacgcatatgtatattttagatctccagatttcataatatgatcacatgccttaaatgtcagtgcttccatgatataatctggaacactaatgggtgacgaaaaagatacagcaccatatgctacgttgataaataaatctgaaccactaagtagataatgattaatgttaaggaagaggaaatattcagtatatagatatgccttagcatcatatcttgtactaaacacgctaaacagtttattgatgtgatcaatttccaacagaataattagagcagcgggaataccaacaaacatattaccacatccgtattttctatgaatatcacatattatgttaaaaaatcttgatagaagagcgaatatctcgtctgacttaatgagacgtagttcagcagcagcataagtcataactgtaaatagaacatactttcctgtagtgttgattctagactccacatcaacaccattattaaaaatagttttatatacatctttaatctgctctccgttaatcgtcgaacgttctagtatacggaaacactttgatttcttatctgtagttaatgacttagtgatatcacgaagaatattacgaattacatttcttgtttttcttgagagacctgattcaaaactcaactcatcgttccatagtttttttacctcagtggcgaaatctttggagtgcttggtacatttttcaataaggttcgtgacctccatttattataaaaaattttattcaaaacttaactacaatcgggtaattataaaatcgtagatctcccatgtggtggaatactaccatctatcgcatgtggatggacagtaggtaatggccatgggaacagtaatgtttgcatatttatctttcttgccagtattactgcatattgtcccaatgtttcgatgtgatgttctaacctatcaactgccgctgtatcacaacaatagtgtccgatggaattaagattatgatccaatgtgtttaatatatgattatcaagtcttatacgatccgcgtcttttttgacaggatcaggttcttctacaggaagaagtttcggcctcttatgatattcatgtctgggaaacggtggtctagggtgaggctccggtatcggagtgggttttggattataatcatcatcgtctatgacatcatcatcttcgacttcgatatttattttgctatcttgatgatgtcctgtatcagttgcattttcagcactcgactgaatattagcgcattcattgtctattattaccatatttctaaacccaaaatgtatgtgttgaacatcactactatcgttgatgagtcttatagcatgaattcgcttatcgttatcgggtttagcttctgtcaccttagcaattccttttttattaaactctacataatcatatccatttctattgtttgttctaatataaacgagtatagcatcattgctaaatttttcaatagtatcgaaaacagaatatcctaaaccatataatatatattcaggaacactcaaactaaatgtccaggattctcctaaatacgtaaactttaatagtgcgaaatcattcaaaaatctaccacttatagatagatagtacataaatgcgtatagtagtctacctatctctttattatgaaaaccggcattacgatcatatatgtcgtgatatacctgtgatccgtttacgttaaaccataaatacatgggtgatcctataaacatgaatttatttctaattctcagagctatagttaattgaccgtgtaatatttgcttacatgcatacttgatacgctcattaataagatttttatcattgctcgttatctcaggatcgtatatataaggagtaccatcgtgattcttaccagatattatacaaaatactatatataaaatatattgaccaacgttagtaatcatataaatgtttaacgttttaaattttgtattcaatgatccattatcatacgctagcatggttttatgatattcattctttaaaatataatattgtgttagccattgcattggggctcctaatggagattttttattctcatccattttaggataggctttcataaagtccctaataacttcgtgaataatgtttctatgttttctactgatgcatgtatttgcttcgatttttttatcccatgtttcatctatcatagatttaaacgcagtaatgctcgcaacattaacatcttgaaccgttggtacaattccgttccataaatttataatgttcgccatttatataactcattttttaaatatacttttaattgaacaaaagagttaagttactcatatggacgccgtccagtctgaacatcaatctttttagccagagatatcatagccgctcttagagtttcagcgtgattttccaacctaaatagaacttcatcgttgcgtttacaacacttttctatttgttcaaactttgttgttacattagtaatctttttttccaaattagttagccgttgtttgagagtttcctcattgtcgtcttcatcggctttaacaattgcttcgcgtttagcctctggctttttagcagcctttgtagaaaaaaattcagttgctggaattgcaagatcgtcatctccggggaaaagagttccgtccatttaaagtacagattttagaaactgacactctgcgttatttatatttggtacaacacatggattataaatatcgatgttaataacatcagaaaatgtaaagtctatacattgttgcatcgtgttaaattttctaatggatctagtattattgggtccaacttctgcctgaaatccaaatatggaagcggatacaaaaccgtttcctggataaaccacacatctccacttttgctttacatcagaaattgtgtcgttgacatcttgaactctcctatctaatgccggtgttccacctatagattttgaatattcgaatgctgcatgagtagcattaaattccttaatattgccataattttcatatattgagtaaccctggataaaaagtaaacacaccgcagccgtcgctaccacaataaaaaaaattgatagagagttcatttataatctattagaagctgacaaaatttttttacacgcatcagacaatgctttaataaatagttcaacatctacttttgtcatatcgaaccgatggtatgattctaacctagaattacatccgaaaaagttgactatgttcatagtcattaagtcattaacaaacaacattccagactctggattataagacgatactgtttcgtcacaattacctaccttaatcatgtgattatgaatattggctattagagcaccttctaagaaatctataatatctttgaaacacgatttaaaattaaaccacgaatatacttctacgaagaaagttagtttacccataggagaaataactataaatggagatctaaatacaaaatccggatctatgatagttttaacattattatattctctattaaatacctccacatctaaaaatgttaattttgaaactatgtcttcgtttattaccgtacctgaactaaacgctataagctctattgtttgagaactctttaaacgatattcttgaaatacatgtaacaaagtttcctttaactcggtcggtttatctaccatagttacagaatttgtatccttatctataatataataatcaaaatcgtataaagttatataattatcgcgttcagattgggatcttttcaaatagactaaaaaccccatttctctagtaagtatcttatgtatatgtttgtaaaatatcttcatggttggaatatgctctaccgcagttatccattcctcattgacagcggtagatgtattagacaaaactattccaatgtttaacaagggccattttacgagattattaaatccttgtttgataaatgtagccaatgagggttcgagttcaacgacgattgaattctcttcccgcggatgctgcatgatgaacgacgggatgttgttcgattgatttggaattctttttcgactttttgtttatattaaatattttaaaatttatagctgatagcaattcatgtactacggataatgtagacgcgtattgcgcatcgatatctttattattagataaatttatcaataaatgtgagaagtttgcctcgttaaggtcttccatttaaatattatataaacatttgtgtttgtaacttattcgtcttttatggaatagtttttaactagtaaagctgtaattacatactttgtccgtaaaacataaatataaacacccgcttttatcaaacgttccaaaaagtcgacagcggacatttttaacatggcatctattttaaatacacttaggtttttggaaaaaacatcattttataattgtaacaattcaataactaaagaaaagattaagattaaacataagggaatgtcatttgtattttataagccaaagcattctaccgttgttaaatacttgtctggaggaggtatatatcatgatgatttggttgtattggggaaggtaacaattaataatctaaagatgatgctattttacatggatttatcatatcatggagtgacaagtagtggagcaatttacaaattgggatcgtctatcgatagactttctctaaataggactattgttacaaaagttaataataattataataattataattattataattatgatgatacattttttgacgacgatgattgatcgctattgcacaattttgtttttgtactttctaatatagtgtttaggttctttttcatatgagaatattgatttactaaaatatctatgtttaacttttgttctataacgtccttatcggcggtatcggtacatatacgtaattcaccttcacaaaatacggagtcttcgataataatagccaatcgattattggatctagctgtctgtatcatattcaacatgtttaatatatcctttcgtttcccctttacaggcatcgatcgtagcatattttccgcgtctgagatggaaatgttaaaactacaaaaatgcgtaatgttagcccgtcctaatattggtacgtgtctataagtttggcatagtagaataatagacgtgtttaaatgccttccaaagtttaagaattctattagagtattgcattttgatagtttatcgcctacatcatcaaaaataagtaaaaagtgtgctgattttttatgattttgtgcgacagcaatacatttttctatgttacttttagttcgtatcagattatattctagagattcctgactactaacgaaattaatatgatttggccaaatgtatccatcataatctgggttataaacgggtgtaaacaagaatatatgtttatattttttaactagtgtagaaaacagagatagtaaatagatagtttttccagatccagatcctcccgttaaaaccattctaaacggcatttttaataaattttctcttgaaaattgtttttcttggaaacaattcataattatatttacagttactaaattaatttgataataaatcaaaatatggaaaactaaggtcgttagtagggaggagaacaaagaaggcacatcgtgacataaataacatttattatcatgatgacaccagaaaacgacgaagagcagacatctgtgttctccgctactgtttacggagacaaaattcagggaaagaataaacgcaaacgcgtgattggtctatgtattagaatatctatggttatttcactactatctatgattaccatgtccgcgtttctcatagtgcgcctaaatcaatgcatgtctgctaacgaggctgctattactgacgccgctgttgccgttgctgctgcatcatctactcatagaaaggttgcgtctagcactacacaatatgatcacaaagaaagctgtaatggtttatattaccagggttcttgttatatattacattcagactaccagttattctcggatgctaaagcaaattgcactgcggaatcatcaacactacccaataaatccgatgtcttgattacctggctcattgattatgttgaggatacatggggatctgatggtaatccaattacaaaaactacatccgattatcaagattctgatgtatcacaagaagttagaaagtatttttgtgttaaaacaatgaactaatatttatttttgtacattaataaatgaaatcgcttaatagacaaactgtaagtaggtttaagaagttgtcggtgccggccgctataatgatgatactctcaaccattattagtggcataggaacatttctgcattacaaagaagaactgatgcctagtgcttgcgccaatggatggatacaatacgataaacattgttatttagatactaacattaaaatgtctacagataatgcggtttatcagtgtcgtaaattacgagccagattgcctagaccggatactagacatctgagagtattgtttagtattttttataaagattattgggtaagtttaaaaaagaccaataataaatggttagatattaataatgataaagatatagatattagtaaattaacaaattttaaacaactaaacagtacgacggatgctgaagcgtgttatatatacaagtctggaaaactggttaaaacagtatgtaaaagtactcaatctgtactatgtgttaaaaaattctacaagtgacaacaaaaaatgaattaataataagtcgttaacgtacgccgccatggacgccgcgtttgttattactccaatgggtgtgttgactataacagatacattgtatgatgatttcgatatttcaatcatggactttataggaccatacattatatgtaacataaaaactgtccaaatagatgtacgggatataaaatattccgacatgcaaaaatgctactttagctataagggtaaaatagttcctcaggattctaatgatttggctagattcaacatttatagcatttgtgccgcatacagatcaaaaaataccatcatcatagcatgcgactatgatatcatgttagatatagaaggtaaacatcagccattttatctattcccatctattgatgtttttaacgctacaatcatagaagcgtataacctgtatacagctggagattatcatctaatcatcaatccttcagataatctgaaaatgaaattgtcgtttaattcctcattctgcatatcagacggcaatggatggatcataattgatgggaaatgcaatagtaattttttattataaaagttgtaaagtaaataataaaacaataaatattgaactagtagtacgtatattgagcaatcagaaatgatgctggtacctcttatcacggtgaccgtagttgcgggaacaatattagtatgttatatattatatatttgtaggaaaaagatacgtactgtctataatgacaataaaattatcatgacaaaattaaaaaagataaagagttctaattccagcaaatctagtaaatcaactgatagcgaatcagactgggaggatcactgtagtgctatggaacaaaacaatgacgtagataatatttctaggaatgagatattggacgatgatagcttcgctggtagtttaatatgggataacgaatccaatgttatggcgcctagcacagaacacatttacgatagtgttgctggaagcacgctgctaataaataatgatcgtaatgaacagactatttatcagaacactacagtagtaattaatgaaacggagactgttgaagtacttaatgaagataccaaacagaatcctaactattcatccaatcctttcgtaaattataataaaaccagtatttgtagcaagtcaaatccgtttattacagaacttaacaataaatttagtgagaataatccgtttagacgagcacatagcgatgattatcttaataagcaagaacaagatcatgaacatgaacacgatgatatagaatcatcggttgtatcattggtgtgattagtttcctttttataaaattgaagtaatatttagtattattgctgccgtcacgttgtacaaatggagatattccctgtattcggcatttctaaaattagcaattttattgctaataatgactgtagatattatatagatacagaacatcaaaaaattatatctgatgagatcaatagacagatggatgaaacggtacttcttaccaacatcttaagcgtagaagttgtaaatgacaatgagatgtaccatcttattcctcatagattatcgacgattatactctgtattagttctgtcggaggatgtgttatctctatagataatgacgtcaatggcaaaaatattctaacctttcccattgatcatgctgtaatcatatccccactgagtaaatgtgtcgtagttagcaagggtcctacaaccatattggttgttaaagcggatatacctagcaaacgattggtaacatcgtttacaaacgacatactatatgtaaacaatctgtcactgattaattatttgccgttgtctgtatttattattagacgagttaccgactatttggatagacacatatgcgatcagatatttgcgaataataagtggtattccattataaccatcgacaataagcagtttcctattccatcaaactgtataggtatgtcctctgccaagtacataaattctagcatcgatcaagatactttaatacatgtttgtaacctcgagcatccattcgacttagtatacaaaaaaatgcagtcgtacaattctgtacctatcaaggaacaaatattgtacggtagaattgataatataaatatgagcattagtatttctgtgtattaatagatttctagtatggggatcattaatcatctctaatctctaaatacctcataaaacgaaaaaaatactgctacaaatgaaaaaaaagctattatcaaatactgtacggaatggattcattctcttctctttttatgaaactctgttgtatatctactgataaaactggaagcaaaaaatctgataaaaagaataaaaataagatcaaggattatatggaacacgattattataaaataacaatagttcctggttcctcttccacgtctactagctcgtggtattatacacatgcctagtaatagtctctttgcgttgatggaaagcagactagaaataacaggctaaaatgttcagacaccataatagttcccaacccagataataacagagttccatcaacacattcctttaaactcaatcccaaacccaaaaccgttaaaatgtatccggccaattgatagtagataatgaggtgtacagcacatgataatttacacagtaaccaaaatgaaaacactttagtaattataagaaatatagacggtaatgtcatcatcaacaatccgataatatgcctgagagtaaacattgatggataaaacaaaaatgccccgcataactctatcatggcaataatacaaccaaacacttgtaaaattcctaaattagtagaaaatacaactgatatcgatgtataagcgatttcgaggaataataaaaacaaagtaatgcccgtaaagataaacatcaacattgtttggtaatcattaaaccaattagtatgacgttgaactaatttcacagtaaattttattccagtattatccccgcatgtatacgtacctggtaagatatctttatattctataatcaatgagacatcactatccgataacgaatgaagtctagcactagtatgccatttacttaatatggtcgtcttggaagttttattataagttaaaatatcatggttgtccaatttccatctaatatactttgtcggattatctatagtacacggaataatgatggtattattacatgctgtatactctatagtctttgtagatgttataatcataaaagtacagaggtatatcaacaatattctaactcttaacatttttatttatttaaaatgatacctttgttatttattttattctattttgctaacggtatcgaatggcataagtttgaaacgagtgaaaaaataatttctacttacttaatagatgacgtattatacacgggtgttaatgggggggcagtatatacattttcaaataataaactaaacaaaactggtttagctaatactaattatatcacaacatctataaaagtagagaatgaggatacattagtatgcggaaccaataacggaaatcccaaatgttggaaaatagacggttcagacgacccaaaacatagaggtagaggatacgctccttatagcaaagtaacgataatcagttacaacgaatgtgtactatctgacataaacatatcaaaagaaggaattaaacgatggagaagatttgacggaccatgtggttatgatttattcacggcggataacgtaattccaaaagatggtttacgaggagcattcgtcgataaagacggtacttatgacaaagtttacattcttttcactgatactatcggctcaaagagaattgttaaaattccgtatataacacaaatgtgcttaaacgacaaaggtggtccatcatcgttgtctagtcatagatggtcgacgtttttcaaagtcgaattagaatgtgacatcgacggaagaagttatagacaaattattcattctaaaactataaaaacagataatgatacgatactatatgtattcttcgatagtccttattccaagtccgcattatgtacctattctatgaataccattaaacaatctttttctacgtcaaaattggaaggatatacaaagcaattgccgtctccagctcctggtatatgtttaccagctggaaaagttgtttcacataccacgtttgacgttatagaacaatataatgtactagatgatattataaagcctttatctaaaccaacctatcttcgaaggaccgtctggcgttaaatggttcgatataaaggagaaggaaaatgaacatcgggaatatagaatatacttcataaaaaaaaattttatatattcattcgatacaaaaactaaacaaactcgcagtgcacaagtcaatgcacaactattttcagtaatggtaactgcgaaaccgttatttatagcagatatagggataggagtaggaatgccacgaatgaaaaaatacttaaaatgtaatcttaattcgagtacaccacacgacaatgaacaaacctaagacagattatgctggttatgcttgctgcgtaatatgcggtttaattgtcgaaattatttttacagcgacactattaaaagttgtagaacgtaaattagttcatacaccatcaatagataaaacgataaaagatgcatatattagagaagattgtcctactgactggataagctataataataaatgtatacatttatctactaatcaaaaaacctgggaggaaggacgtaatacatgcaaagctctaaatccaaattcggatctaattaagatagagactccaaacgagttaagttttttaagaagccttagacgaggctattgggtaggagaatccgaaatattaaaccagacaaccccatataattttatagctaaaaatgccacgaagaatggaactaaacatatgaacggaactaaaaaacggaaatatatttgtagtacaacgaatactcccaaactgcattcgtgttacactatataacaattacactacatttttatcataacactacttcggttagatgttttagaaaaaaataaatattgccgtactgttcttgtttttataaaaataacaattaacaattatcaaattttttctttaatattttacgtggttgaccattcttggtggtaaaataatctcttagtgttggaatggaatgctgtttaatgtttccacactcatcgtatattttgacgtatgtagtcacatcgtttacgcaatagtcagactgtagttctatcatgcttcctacattagaaggaggaacagttttaaagtctcttggttttaatctattaccgttagttttcatgaaatcctttgttttatccacttcacattttaaataaatgtccactatacattcttttgttaattttactagatcgtcatgggtcatagaatttataggttccgtagtccatggatccaaactagcaaacttcgcgtatacggtatcgcgattagtgtatacaccaactgtatgaaaattaagaaaacagtttaatagatcaacagaaatatttaatcctccgtttgatacagatgcaccatatttatggattttggattcacacgttgtttgtctgaggggttcgtctagcgttgcttctacataaacttctattcccatatattctttattgtcagaatcgcataccgatttatcatcatacactgtttgaaaactaaatggtatacacatcaaaataacaaatactaacgagtacattctgcaatattgttatcgtaattggaaaattagtgttcgagtgagtcggattatgtgagtactggattgtatattttattttatattttatattttgtaataagaataaaatgctaatgtcaagtttattccaatagatgtcttattaaaaacatatataataaataacaatggctgaatggcataaaattatcgaggatatctcaaaaaataataagtttgaggatgccgccatcgttgattacaagactacaaagaatgttctagcggctattcctaacagaacatttgcaaagattaatccgggtgaagttattccgctcatcactaatcataatattctaaaacctcttattggtcagaaattttgtattgtatatactaactctctaatggacgagaacacgtatgctatggagttgcttactgggtacgcccctgtatctccgatcgttatagcgagaactcataccgcacttatatttttgatgggtaagccaacaacatccagacgtgatgtgtatagaacgtgtagagatcacgctacccgtgtacgcgcaactggtaattaaaataaaaagtaatattcatatgtagtgtcaattttaaatgatgatgaaatggataatatccatattgacgatgttaataatgccggtattggcatacagttcatcgatttttagatttcattcaaaggatgtggaattatgttatgggaatttgtattttgataggatctataataatgtagtaaatataaaatatattcctgagcatattccatatagatataattttattaatcgcgcgttctccgtagatgaactagacgataatgtcttttttacacatggttattttttaaaacacaaatatggttcacttaatcctagtttgattgtctcattatcaggaaacttaaaatataatgatatacaatgctcagtaaatgtattgtgtctcattaaaaatttggcaacgagtacatctactatattaacatctaaacacaaaacgtattctctacatcggtccaagtgtattattataataggatatgattctattatatggtataaagatataaatgacaagtataatggcatctatgattttactgcaatatgtatgctaatagcgtctacattgatagtgaccatatacgtgtttaaaaaaataaaaatgaactcttaattatgctatgctattagaaatggataaaatcaaaattacggttgattcaaaaattggtaatgttgttaccatatcgtataacttggaaaagataactattgatgttacaccaaaaaagaaaaggatgtattattagcgcaatcagttgctgtcgaagaggcaaaagatgtcaaggtggaagaaaaaaatattatcgatattgaagatgacgatgatatggatgtaaaaagcgcgtaatactatctataaacataagtatataataaatactttttatttacggtactcttgtagtggtgataccctactcaattatttttttaaaaaaatacttattctgattcttctagccatttccgtgttcgttcgaatgccacatcgacgttaaagataggggagtagttgaaatctagttctgcattgttggtacgcaccttaaatgtagtgttggatatcttcaacgtatagttgttgagtagtgatggttttctaaatagaattctcttcatatcattcttgcacgcgtacatttttagcatccatcttggaatcctagatccttgttctattcccaatggtttcatcaatagaagattaaacatatcgtacgaacacgatggagagtaatcgtagcaaaagtaagcatttcctttaatctcagatcccggatactggatatattttgcagccaacacgtgcatccatgcagcatttcctacatatacccggctatgtaccgcgttatcatcgactgtacgatacataatgttaccgtgttgcttacattgctcgtaaaagactttcgtcaatttgtctccttctccgtaaattccagtgggtcttaggcaacaagtatacaattttgctccattcatgattacggaattattggctttcataaccagttgctcggccatacgtttactttttgcgtatacatgtcctggtgatatatcataaagggtatgctcatggccgatgaatggatcaccgtgtttattgggtcctattgcttccatgctactagtatagatcaaatacttgattcctaggtccacacaagctgccaaaatagtctgtgttccataatagtttactttcatgatttcattatcggtgtattttccaaatacatccactagagcagctgtatgaataatcagatttaccccatttagcgcttctcttaccttatcaaagtcgtttatatcacattgtatatagtttataaccttaaccttcgaggttattggttgtggatcttctacaatatctatgactctgatttcttgaacatcatctgcactaattaaaagttttactatatacctgcctagaaatccggcaccaccagtaaccgcgtacacggccattgctgccactcataatatcaaactacttattctattttactaaataatggctgtttgtataatagaccacgataatatcagaggagttatttactttgaaccagttcatggaaaagataaagttttaggatcagttattggattaaaatccggaacgtatagtttgataattcatcgttacggagatattagtcaaggatgtgattccataggcagtccagaaatatttatcggtaacatctttgtaaacagatatggtgtagcatatgtttatttagatacagatgtaaatatatttacaattattggaaaggcgttatctatttcaaaaaatgatcagagattagcgtgtggagttattggtatttcttacataaatgaaaagataatacattttcttacaattaacgagaatggcgtttgatatatcagttaatgcgtctaaaacaataaatgcattagtttacttttctactcagcaaaataaattagtcatacgtaatgaagttaatgatacacactacactgtcgaatttgatagggacaaagtagttgacacgtttatttcatataatagacataatgacaccatagagataagaggggtgcttccagaggaaactaatattggttgcgcggttaatacgccggttagtatgacttacttgtataataagtatagttttaaactgattttagcagaatatataagacacagaaatactatatccggcaatatttattcggcattgatgacactagatgatttggctattaaacagtatggagacattgatctattatttaatgagaaacttaaagtagactccgattcgggactatttgactttgtcaactttgtaaaggatatgatatgttgtgattctagaatagtagtagctctatctagtctagtatctaaacattgggaattgacaaataaaaagtataggtgtatggcattagccgaacatatatctgatagtattccaatatctgagctatctagactacgatacaatctatgtaagtatctacgcggacacactgagagcatagaggataaatttgattattttgaagacgatgattcgtctacatgttctgccgtaaccgacagggaaacggatgtataatttttttatagcgtgaaggatatgataaaaaatataattgttgtatttatcccattccaatcaccttatatgattctgtaaaaaaattatactgtaacacaatgaaggagtcttatagatgtatagaggtcagatactggtttgataaactgtttattccacataagtatgtttgactttatggttaaacccgcatactttaacaaatcactgaaaattggagttaggtattgacctctcagaatcagttgccgttctggaacattaaatgtattttttatgatatactccaacgcatttatgtgggcatacaacaagtcattactaatggagtattccaagagttttagttgtctagtatttaacaagagaagagatttcaacagactgtttatgaactcgaatgccgcctcattgtcgcttatattgatgatgtcgaattctcccaatatcatcaccgatgagtagcttatcttgttatcgggatccaagttttctaaagatgtcattaaaccctcgatcatgaatggatttatcatcatcgtttttatgttggacatgagcttagtccgtttgtccacatctatagacgacgatttctgaattatttcatatatccctctctttaactccaggaacttgtcaggatggtctactttaatatgttctcgtctaagagatgaaaatctttggatggttgcacgcgacttttctctaaaggatgacgttgcccaagatcctctcttaaatgaatccatcttatccttggacaagatggacagtctattttccttagatggtttaatatttttgttacccatgatctataaaggtagacctaatcgtctcggatgaccatatatttattttcagttttattatacgcataaattgtaaaaaatatgttaggtttacaaaaatgtctcgtggggcattaatcgtttttgaaggattggacaaatctggaaaaacaacacaatgtatgaacatcatggaatctataccggcaaacacgataaaatatcttaactttcctcagagatccactgtcactggaaagatgatagatgactatctaactcgtaaaaaaacctataatgatcatatagttaatctattattttgtgcaaatagatgggagtttgcatcttttatacaagaacaactagaacagggaattactttaatagttgatagatacgcattctctggagtagcgtatgccgccgctaaaggcgcgtcaatgactctcagtaagagttatgaatctggattgcctaaacccgacttagttatattcttggaatctggtagcaaagaaattaatagaaacgtcggcgaggaaatttatgaagatgttacattccaacaaaaggtattacaagaatataaaaaaatgattgaagaaggagatattcattggcaaattatttcttctgaattcgaggaagatgtaaagaaggagttgattaagaatatagttatagaggctatacacacggttactggaccagtggggcaactgtggatgtaatagtgaaattacattttttataaatagatgttagtacagtgttataaatggatgaagcatattactctggcaacttggaatcagtactcggatacgtgtccaatatgcataccgaactcgtatcaatatctcaattagttattgccaagatagaaactatagataatgatatattaaacaaggacattgtaaattttatcatgtgtagatcaaacttggataatccatttatctctttcctagatactgtatatactattatagatcaagagaactatcagactgagttgattaattcattagacgacaatgaaattatcgattgtatagttaataagtttatgagcttttataaggataacctagaaaatatagtagatgctatcatcactctaaaatatataatgaataatccagattttaaaactacgtatgtagaagtactcggttccaaaatagcggatatagatattaaacaagtgatacgtgagaatatactacaattgtctaatgatatccgcgaacgatatttgtgaaaatattaaaaaaaaatactttttttattaaatgacgtcttttcgtgaatttagaaaattatgctgtgctatatatcacgcatcaggatataaagaaaaatctaaattaattagagactttataacagatagggatgataaatatttgatcattaagctattgcttcccggattagacgatagaatttataacatgaacgataaacaaattataaaattatatagtataatatttaaacaatctcaggaagatatgctacaagatttaggatacggatatataggagacactattagtacattcttcaaagaaaacacagaaatccgtccaagagataaaagcattttaactttagaagacgtggatagtttcttaactacgttatcatccgtaactaaagaattgcatcaaataaaattattgactgatgtagcatctgtttgtacatgtaatgatttaaaatgtgtagtcatgcttattgataaagatctaaaaattaaagcgggccctcggtacgtacttaacgctattagtcctcatgcctatgatgtttttagaaaatctaataacttgaaagagataatagaaaattcatctaaacaaaatctagactttatatctatttctgttatgactccaattaatcccatgttagcggaatcgtgtgattctgtcaataaggcgtttaaaaaatttccatcaggaatgtttgcggaagttaaatacgatggtgaaagagtacaagttcataaaaataataacgagtttgccttctttagtagaaacatgaaaccagtactctctcataaagtggattatctcaaagaatacataccgaaagcatttaaaaaagctacgtctatcgtattggattctgaaattgttcttgtagacgaacataatgtaccgctcccgtttggaagtttaggtatacacaaaaaaaaagaatataaaaactctaacatgtgtttgttcgtgtttgactgtttgtactttgatggattcgatatgacggacattccattgtacgaacgaagatcttttctcaaagatgttatggttgaaatacccaatagaatagtattctcagagttgacgaatattagtaacgagtctcagttaactgacgtattggatgatgcactaacgagaaaattagaaggattggtcttaaaagatattaatggagtatacgaaccgggaaagagaagatggttaaaaataaagcgagactatttgaacgagggttccatggcagattctgccgatttagtagtactaggtgcttactatggtaaaggagcaaagggtggtatcatggcagtctttctaatgggttgttacgacgatgaatccggtaaatggaagacggttaccaagtgttcaggacacgatgataatacgttaaggaagttgcaagaccaattaaagatgattaaaattaacaaggatcccaaaaaaattccagagtggttagtagttaataaaatctatattcccgattttgtagtagaggatccaaaacaatctcagatatgggaaatttcaggagcagagtttacatcttccaagtcccataccgcaaatggaatatccattagatttcctagatttactaggataagagaggataaaacgtggaaagaatctactcatttaaacgatttagtaaacttgactaaatcttaatagttacatacaaactaaaaattaaaataacactatttagttggtggtcgccatggatggtgttattgtatactgtctaaacgcgctagtaaaacatggcgaggaaataaatcatataaaaaatgatttcatgattaaaccatgttgtgaaagagtttgtgaaaaagttaagaacgtttacatcgacggacaatctaaaaacaatacagtgattgcagatttgccatatctggataatgctgtatcggatgtatgcaaatatatatatagtatcaagaatatccagatttgctaatttgataaagatagatgacgatgacaagactcctactggtgtatataattattttaaacctaaagatgccattcctgttattatatccataggaaaggatagagatgtttgtgaactattaatttcatctgataaagcgtgtgcgtgtatagagttaaattcatataaagtagccattcttcccatggatgtttccttttttaccaaaggaaatgcatcattgattattctcctgtttgatttctctatcgatgcggcacctctcttaagaagtgtaaccgataataatgttattatatctagacaccagcgtctacatgacgagcttccgagttccaattggttcaagttttacataagtataaagtccgactattgttctatattatatatggttgttgatggatctgtgatgcatgcaatagctgataatagaacttacgcaaatattagcaaaaatatattagacaatactacaattaacgatgagtgtagatgctgttattttgaaccacagattaggattcttgatagagatgagatgctcaatggatcatcgtgtgatatgaacagacattgtattatgatgaatttacctgatgtaggcaaatttggatctagtatgttggggaaatatgaacctgacatgattaagattgctcttttggtggctggtaatttaataagaaatcgagactacattcccgggagacgaggctatagctactacgtttacggtatagcctctagataatttttttaagcacgaaataaaaaacataattttaaaccaatctattttatactattttgtgtaatcaccatggacataaagatagatattagtatttttggtgataaatttacggtgactactaggagggaaaatgaagaaagaaaaaaatatctacctctccaaaaagaaaaaactactgatgttatcaaacctgattatcttgagtacgatgacttgttagatagagatgagatgtttactattctagaggaatattttatgtacagaggtctattaggcctcagaataaaatatggacgactctttaacgaaattaaaaaattcgacaatgatgcggaagaacaattcggtactatagaagaactcaagcataaacttagattaaattctgaagagggagcagataactttatagattatataaaggtacaaaaacaggatatcgtcaaacttactgtatacgattgcatatctatgataggattgtgtgcatgcgtggtagatgtttggagaaatgagaaactgttttctagatggaaatattgtttacgagctattaaactgtttattaatgatcacatgcttgataagataaaatctatactgcagaatagactagtgtatgtggaaatgtcatagaaagttaaaagttaatgagagcaaaaatatataaggttgtattccatatttgttattttttctgtaatagttaaaaaatacattcgatggtctatctatcagattattatgtgttataaggtactttttctcataataaactagagtatgagtaagatagtgtttttcaaaacatataaatctaaaattgatggatgagatatacagctattaatttcgaaaatatattttaatctgataactttaaacatggatttttgatggtggtttaacgttttaaaaaaagattttgttattgtagtatatgataatattaaaagatggatataaagaatttgctgactgcatgtactattttttacattactacattggctacggcagatatacctactccgccaccacacgctccggtaaacgggtcatgtgacaagggagaatatcttgataagaggcataatcaatgttgtaatcggtgtccacctggagaatttgccaaggttagatgtaatggtaacgataacacaaaatgtgaacgctgcccacctcatacatataccgcaatcccaattattctaatggatgtcatcaatgtagaaaatgcccaaccggatcatttgataaggtaaagtgtaccggaacacagaacagtaaatgttcgtgtcttcctggttggtattgcgctactgattcttcacagactgaagattgttgaaattgtgtaccaaaaaggagatgtccatgcggatactttggtggaatagatgaacaaggaaatcctatttgtaaatcgtgctgtattggtgaatattgcaactacctacgtaattatagacttgatccattttctccatgcaaactatctaaatgtaattaattatgattatgattatgattttgattttgattttgatgataatgttaccatacattatatcgctacttggttagtgtattattcagtatgaagacctattaataattacttatcttttgacgatcttgttataattataatataaaaacttatggcatagtaacttataattgctaacacgataaattcgtaataatctgttttgttcaaatttttataaggaatctacaggcataaaaataaaaatataatctataatatactcttacaacgccatcatgaatagcagcagtaaattaattgctgttattaatggatttagaaatagtggacgattttgtgatattaatatagttattaatgatgaaaggataaacgctcataaactcatcctatctggagcctccgaatatttttccattctgttttccaataattttatcgattctaatgaatacgaagttaatctaagtcatttagattatcaaagcgtaaacgatttgatcgattatatttatgggatacctttgagcctaactaacgataacgtgaaatatattctttcaaccgctgattttttacaaattggatctgctattacggagtgtgaaaattacatacttaaaaatctttgttctaaaaactgtatcgatttctacatatacgctgataaatataataacaagaaaatagaatcagcgtcgtttaacacaatattacaaaatattttgagactcatcaacgatgaaaactttaaatacttaacagaggaatcaatgataaaaattttaagcgatgatatgttaaatataaaaaatgaggatttcgccccactaattctcattaaatggttagagagtactcaacaaccatgcaccgtcgagttacttaaatgcctcagaatatcattgctttccccacaagttataaaatcactttatagtcatcgactggttagttcaatctacgaatgtataacattcttaaacaatatagcattcttggatgaatcatttcctagataccatagcatcgagttgatatctatcggtataagtaattcgcgtgataaaatttccataaactgctacaatcataaaaaaaatacatgggaaatgatatcttcacgtagatataggtgtagtttcgcagtggccgtcctggataatattatttatatgatgggtggatatgatcagtccccgtatagaagttcaaaggttatagcgtacaatacatgtacaaattcttggatatatgatataccagagctaaaatatcctcgttctaattgtgggggactggctgatgacgaatacatttattgtataggcggcatacgcgatcaggattcatcgttgacatctagtattgataaatggaagccatcaaaaccatattggcagaagtatgctaaaatgcgcgaaccaaaatgtgatatgggggttgcgatgttaaacggattaatatatgttataggtggaatcgttaaaggtgacacgtgtaccgacgcactagagagtttatcagaagatggatggatgaagcatcaacgtcttccaataaaaatgtccaatatgtcgacgattgttcatgatggcaagatttatatatctggaggttacaacaatagtagtgtagttaatgtaatatcgaatctagtccttagctataattcgatatatgatgaatggaccaaattatcatcattaaatattcctagaattaatcccgctctatggtcaacgcataataaattatatgtaggaggaggaatatctgatgatgttcgaactaatacatctgaaacatacgataaagaaaaagattgttggacattggataatggtcacgtgttaccacgcaattatataatgtataaatgcgaaccgattaaacataaatatccattggaaaaaacacagtacacgaatgattttctaaagtatttggaaagttttataggtagttgatagaacaaaatacataattttgtaaaaataaatcactttttatactaatatgacacgattaccaatacttttgttactaatatcattagtatacgctacaccttttcctcagacatctaaaaaaataggtgatgatgcaactctatcatgtaatcgaaataatacaaatgactacgttgttatgagtgcttggtataaggagcccaattccattattcttttagctgctaaaagcgacgtcttgtattttgataattataccaaggataaaatatcttacgactctccatacgatgatctagttacaactatcacaattaaatcattgactgctagagatgccggtacttatgtatgtgcattctttatgtcatcaactacaaatgacactgataaagtagattatgaagaatactccacagagttgattgtaaatacagatagtgaatcgactatagacataatactatctggatctacacattcaccagaaactagttctgagaaaccagaggatatagataattttaattgctcgtcggtattcgaaatcgcgactccggaaccaattactgataatgtagaagatcatacagacaccgtcacatacactagtgatagcattaatacagtaagtgcaacatctggagaatccacaacagacgagactccggaaccaattactgataaagaagatcatacagttacagacactgtctcatacactacagtaagtacatcatctggaattgtcactactaaatcaaccaccgatgatgcggatctttatgatacgtacaatgataatgatacagtaccatcaactactgtaggtagtagtacaacctctattagcaattataaaaccaaggactttgtagaaatatttggtattaccgcattaattatattgtcggccgtggcaatattctgtattacgtattatatatgtaataaacgttcacgtaaatacaaaacagagaacaaagtctagatttttgacttacataaatgtctgggatagtaaaatctatcatattgagcggaccatctggtttaggaaagacagccatagccaaaagactgttaaaagactatgggaatatatttggatttgtggtgtcccataccactagatttcctcgtcctatggaacgagaaggtgtctattaccattacgttaacagagaggccatctgaaagggaatagccgccggaaactttctagaacatactgagtttttaggaaatatttacggaacttctaaaacagctgtgaatacagcggctattaataatcgtatttgtgtgatggatttaaacatcgacggtgttagaagttttaaaaatacttacctaatgccttactcggtgtatataagacctacctctcttaaaatggttgagaccaagcttcgttgtagaaacactgaagctaacgatgagattcatcgtcgtgtgatattggcaaaaacggatatggatgaggccaacgaagcaggtctattcgacactattattattgaagatgatgtgaatttagcatatagtaagttaattcagatactacaggaccgtattagaatgtattttaacactaattaaagacttaagacttaaaacttgataattaataatataactcgtttttatatgtgtctatttcaacgtctaatgtattagttaaatattaaaacttaccacgtaaaacttaaaatttaaaatggtatttcattgacagatagatcacacattatgaactttcaaggacttgtgttaactgacaattgcaaaaatcaatgggtcgttggaccattaataggaaaaggtggatttggtagtatttatactactaatgacaataattatgtagtaaaaatagagcccaaagctaacggatcattatttaccgaacaggcattttatactagagtacttaaaccatccgttatcgaagaatggaaaaaatctcacaatataaagcacgtaggtcttattacgtgcaaggcatttggtctatacaaatccattaatgtggaatatagattcttggtaattaatagattaggtgcagatctagatgcggtgatcagagccaataataatagactaccaaaaaggtcggtgatgttgatcggaatcgaaatcttaaataccatacaatttatgcacgagcaaggatattctcacggagatattaaagcgagtaatatagtcttagatcaaatagataagaataaattatatctagtggattacggattggtttctaaattcatgtctaacggcgaacatgttccatttataagaaatccaaataaaatggataacggtactctagaatttacacctatagattctcataaaggatacgttgtatctagacgtggagatctagaaacacttggatattgtatgattagatggttgggaggtatcttaccatggactaagatatctgaaacaaagaattgtgcattagtaagtgccacaaaacagaaatatgttaacaatactgcaactttgttaatgaccagtttgcaatatgcacctagagaattgctgcaatatattaccatggtaaactctttgacatattttgaggaacccaattacgacaagtttcggcacatattaatgcagggtgtatattattaagtgtggtgtttggttgatgtaaaatttttgttgataaaaattaaaaaaataacttaatttattattgatctcgtgtgtacaaccaaaatcatggcgatgttttacgcacacgctctcggtgggtacgacgaaaatcttcatgcctttcctggaatatcatcgactgttgccaatgatgtcagaaaatattctgttgtgttagtttataataacaagtatgacattgtaaaagacaaatatatgtggtgttacagtcaggtgaacaagagatatattggagcactgttgcctatgtttgagtgcaatgaatatctacaaattggagatccgatccatgatcaagaaggaaatcaaatttctatcatcacataccgccacaaaaactactatgctctaagcggaatcgggtacgagagtctagacttgtgcttggaaggagtaaggattcatcatcacacacttgaagcaggaaacgctgtatatggaaaagttcaacatgattattctactatcaaagagaaggccaaagaaatgaatgcactcagttcaggacttatcatcgattaccacgtctggataggagattgtatctgtcaagttactgctgtagacgtacatggaaaggaaattatgagaatgagattcaaaaagggtgcggtgcttccgatcccaaatctggtaaaagttaaacttggggagaatgatacagaaaatctttcttctactatatcggcggcgccatcgaggtaaccacctctctggaagacagcgtgaataatgtactcatgaaacgtttggaaactatacgccatatgtggtctgttgtatatgatcattttgatattgtgaatggtaaagaatgctgttatgtgcatacgcatttgtctaatcaaaatcttataccgagtactgtaaaaacaaatttgtacatgaagactatgggatcatgcattcaaatggattccatggaagctctagagtatcttagcgaactgaaggaatcaggtggatggagtcccagaccagaaatgcaggaatttgaatatccagatggagtggaagacactgaattaattgagagattggtagaggagttcttcaatagatcaaaacttcaggctggtaaattagtcaaatttggtaattctattaattgttaaacatacatctgtttcagctaagcaactaagaacacgtatacggcagcagcttccttttatactctcatcttttaccaacacaaagggtggatatttgttcattggagttgataataatacacacaaagtatttggattcacggtgggttacgactacctcagactggta

SEQ ID NO: 23 - DNA, 28754 bp, Horsepox virus
atggcgatgttttacgcacacgctctcggtgggtacgacgaaaatcttcatgcctttcctggaatatcatcgactgttgccaatgatgtcagaaaatattctgttgtgttagtttataataacaagtatgacattgtaaaagacaaatatatgtggtgttacagtcaggtgaacaagagatatattggagcactgttgcctatgtttgagtgcaatgaatatctacaaattggagatccgatccatgatcaagaaggaaatcaaatttctatcatcacataccgccacaaaaactactatgctctaagcggaatcgggtacgagagtctagacttgtgcttggaaggagtaaggattcatcatcacacacttgaagcaggaaacgctgtatatggaaaagttcaacatgattattctactatcaaagagaaggccaaagaaatgaatgcactcagttcaggacttatcatcgattaccacgtctggataggagattgtatctgtcaagttactgctgtagacgtacatggaaaggaaattatgagaatgagattcaaaaagggtgcggtgcttccgatcccaaatctggtaaaagttaaacttggggagaatgatacagaaaatctttcttctactatatcggcggcgccatcgaggtaaccacctctctggaagacagcgtgaataatgtactcatgaaacgtttggaaactatacgccatatgtggtctgttgtatatgatcattttgatattgtgaatggtaaagaatgctgttatgtgcatacgcatttgtctaatcaaaatcttataccgagtactgtaaaaacaaatttgtacatgaagactatgggatcatgcattcaaatggattccatggaagctctagagtatcttagcgaactgaaggaatcaggtggatggagtcccagaccagaaatgcaggaatttgaatatccagatggagtggaagacactgaattaattgagagattggtagaggagttcttcaatagatcaaaacttcaggctggtaaattagtcaaatttggtaattctattaattgttaaacatacatctgtttcagctaagcaactaagaacacgtatacggcagcagcttccttttatactctcatcttttaccaacacaaagggtggatatttgttcattggagttgataataatacacacaaagtatttggattcacggtgggttacgactacctcagactggtagagaatgatatagaaaagcatatcaaaagactttgtgttgtgcatttctgtgagaagaaagaggacatcaagtacacgtgtcgattcatcaaggtatataaacctggggatgagactacctcgacatacgtgtgcgctatcaaagtggaaagatgctgttgtgctgtgtttgcagattggccagaatcatggtatatggatactaatggtatcaataagtattctccagatgaatgggtgtcacatataaaattttaattaatgtaatagagaacaaataataaggttgtaatatcatatagacaataactaacaattaattagtaactgttatctcttttttaactaaccaactaactatatacctattaatacatcgtagttatagttcttaacatctattaatcattaattcgcttctttaattttttataaactaacattgttaattgaaaagggataacatgttacagaatataaattatatatggatttttttaaaaaggaaatacttgactggagtatatatttatctcttcattatatagcacgcgtgttttccaatttttccacatcccatataatacaggattataatctcgttcgaacatacgagaaagtggataaaacaatagttgattttttatctaggttgccaaatttattccatattttagaatatggggaaaatattctacatatttattctatggatgatgctaatacgaatattataattttttttctagatagagtattaaatattaataagaacgggtcatttatacacaatctcaggttatcatcatccattgatataaaagaatatgtatatcaattagttaataatgatcatccagataataggataagactaatgcttgaaaatggacgtagaacaagacattttttgtcctatatatcagatacagttaatatctatatatgtattttaataaatcatggattttatatagatgccgaagacagttacggttgtacattattacatagatgtatatatcactataagaaatcagaatcagaatcatacaatgaattaattaagatattgttaaataatggatcagatgtagataaaaaagatacgtacggaaacacaccttttattctattatgtaaacacgatatcaacaacgtggaattgtttgagatatgtttagagaatgctaatatagactctgtagactttaatagatatacacctcttcattatgtctcatgtcgtaataaatatgattttgtaaagttattaatttctaaaggagcaaatgttaatgcgcgtaatagattcggaactactccattttattgtggaattatacacggtatctcgcttataaaactatatttggaatcagacacagagttagaaatagataatgaacatatagttcgtcatttaataatttttgatgctgttgaatctttagattatctattatccagaggagttattgatattaactatcgtactatatacaacgaaacatctatttacgacgctgtcagttataatgcgtataatacgttggtctatctattaaacaaaaatggtgattttgagacgattactactagtggatgtacatgtatttcggaagcagtcgcaaacaacaacaaaataataatggaagtactattgtctaaacgaccatctttgaaaattatgatacagtctatgatagcaattactaaaaataaacaacataatgcagatttattgaaaatgtgtataaaatatactgcgtgtatgaccgattatgatactcttatagatgtacaatcactacagcaatataaatggtatattttaagatgtttcgatgaaatagatatcatgaagagatgttatataaaaaataaaactgtattccaattagttttttgtatcaaagacattaatactttaatgagatatggtaaacatccttctttcgtgaagtgcactagtctcgacgtatacggaagtcgtgtacgtaatatcatagcatctattagatatcgtcagagattaattagtctattatccaagaagctggatcctggagataaatggtcgtgttttcctaacgaaataaaatataaaatattggaaaactttaacgataacgaactgtccacatatctaaaaatcttataaacattattaaaatataaaatctaagtggataaaatcacactacatcattgtttccttttagtgctcgacagtgtatactatttttaacgctcataaataaaaatgaaaacgatttccgttgttacgttgttatgcgtactacctgctgttgtttattcaacatgtactgtacccactatgaataacgctaaattaacgtctaccgaaacatcgtttaataataaccagaaagttacgtttacatgtgatcagggatatcattcttcggatccaaatgctgtctgtgaaacagataaatggaaatacgaaaatccatgcaaaaaaatgtgcacagtttctgattacatctctgaactatataataaaccgctatacgaagtgaattccaccatgacactaagttgcaacggcgaaacaaaatattttcgttgcgaagaaaaaaatggaaatacttcttggaatgatactgttacgtgtcctaatgcggaatgtcaacctcttcaattagaacacggatcgtgtcaaccagttaaagaaaaatactcatttggggaatatatgactatcaactgtgatgttggatatgaggttattggtgctttgtacataagttgtacagctaattcttggaatgttattccatcatgtcaacaaaaatgtgatatgccgtctctatctaacggattaatttccggatctacattttctatcggtggcgttatacatcttagttgtaaaagtggttttacactaacggggtctccatcatccacatgtatcgacggtaaatggaatcccatactcccaacatgtgtacgatctaacgaaaaatttgatccagtggatgatggtcccgacgatgagacagatttgagcaaactctcgaaagacgttgtacaatatgaacaagaaatagaatcgttagaagcaacttatcatataatcatagtggcgttaacaattatgggcgtcatatttttaatctccgttatagtattagtttgttcctgtgacaaaaataatgaccaatataagttccataaattgctaccgtaaatataaatccgttaaaataattaataatttaataacaaacaagtatcaaaagattaaagacttatagctagaatcaattgagatgtctttttcagtggatgttgatatctacgatgccgttagagcatttttactcaggcactattataacaagagatttattgtgtatggaagaagtaacgccatattacataatatatacaggctatttacaagatgcgccgttataccgttcgatgatatagtacgtactatgccaaatgaatcacgtgttaaacaatgggtgatggatacactcaatggtataatgatgaatgaacgcgatgtttctgtaagcgttggcaccggaatactattcatggaaatgtttttcgattacaataaaataattcaaaaaatagtatcaacaatcaactaatgtatgatataattaatagcgtatctataattctagctaatgagagatatagaagcgcttttaacgacgatggtatatacatccgtagaaatatgattaacaagttgtacggatacgcatctctaactactattggcacgatcgctggaggtgtttgttattatctgttgatgcatctagttagtttgtataaataattatttcaatatactagttaaaattttaagattttaaatgtataaaaaactaataacgtttttatttgtaataggtgcattagcatcctattcgaataatgagtacactccgtttaataaactgagtgtaaaactctatatagatggagtagataatatagaaaattcatatactgatgataataatgaattggtgttaaattttaaagagtacacaatttctattattacagagtcatgcgacgtcggatttgattccatagatatagatgttataaacgactataaaattattgatatgtataccattgactcgtctactattcaacgcagaggtcacacgtgtagaatatctaccaaattatcatgccattatgataagtacccttatattcacaaatatgatggtgatgagcgacaatattctattactgcagagggaaaatgctataaaggaataaaatatgaaataagtatgatcaacgatgatactctattgagaaaacatactcttaaaattggatctacttatatatttgatcgtcatggacatagtaatacatattattcaaaatatgatttttaaaaatttaaaatatattatcacttcagtgacagtagtcaaataacaaacaataacaataacagacaacaaacaacaccatgagatatattataattctcgcagttttgttcattaatagtatacatgctaaaataactagttataagtttgaatccgtcaattttgattccaaaattgaatggactggggatggtctatacaatatatcccttaaaaattatggcatcaagacgtggcaaacaatgtatacaaatgtaccagaaggaacatacgacatatccgcatttccaaagaatgatttcgtatctttctgggttaaatttgaacaaggcgattataaagtggaagagtattgtacgggactatgcgtcgaagtaaaaattggaccaccgactgtaacattaactgaatacaacgaccatatcaatttgtacatcgagcatccgtatgctactagaggtagcaaaaagattcctatttacaaacgcggtgacatgtgtgatatctacttgttgtatacggctaacttcacattcggagattctaaagaaccagtaccatatgatatcgatgactacgattgcacgtctacaggttgcagcatagactttgtcacaacagaaaaagtgtgcgtgacagcacagggagccacagaagggtttctcgaaaaaattactccatggagttcgaaagtatgtctgacacctaaaaagagtgtatatacatgcgcaattagatccaaagaagatgttcccaatttcaaggacaaaatggccagagttatcaagagaaaatttaataaacagtctcaatcttatttaactaaatttctcggtagcacatcaaatgatgttaccacttttcttagcatgcttaacttgactaaatattcataactaatttttattaatgatacaaaaacaaaataaaactgcatattatacactggttaacgcccttataggctctaaccattttcaagatgaggtccctgattatagtccttctgttcccctctatcatctactccatgtctattagacgatgtgagaagactgaagaggaaacatggggattgaaaatagggttgtgtataattgccaaagatttctatcccgaaagaactgattgcagtgttcatctcccaactgcaagtgaaggattgataactgaaggcaatggattcagggatatacgaaacaccgataaattataaaaaagcaatgtgtccgctgtttccgttaataatactattttcgtaactggcggattattcataaataactctaatagcacgatcgtggttaacaatatggaaaaacttgacatttataaagacaaacaatggtcgattatagaaatgcctatggctagggtatatcacggcatcgactcgacatttggaatgttatattttgccggaggtctatccgttaccgaacaatatggtaatttagagaaaaacaacgagatatcttgttacaattctagaacgaataagtggtttgatatttcatatactatttataagatatccatatcatcattgtgtaaactaaataacgtcttctatgtatttagtaaggacattggatatgtggaaaagtatgatggtgcatggaagttagtacatgatcgtctccccgctataaaggcattatcaacttctccttattgattgaaaatgaaaatataaatagtttttatgtatagcagtattaccctatagttttattgcttactactaacatggatacagatacagatacagatacagatgttacaaatgtagaagatatcataaatgaaatagatagagagaaagaagaaatactaaaaaatgtagaaattgaaaataataaaaacattaacaagaatcatcccaatgaatatattagagaagcactcgttattaataccagtagtaatagtgattccattgataaagaagttatagaatgtatctgtcacgatgtaggaatatagatcatatctactaatttttataatcaatacaaaacataaaaaacaactcgttattacatagcaggcatggaatccttcaagtattgttttgataacgatggcaagaaatggattatcggaaatactttatattctggtaattcaatactatataaggtcagaaaaaatttcactagttcgttctacaattacgtaatgaagatagatcacaaatcacacaagccattgttgtctgaaatacgattctatatatctgtattggatcctttgactatcgacaactggacacgggaacgtggtataaagtatttggctattccagatctgtatggaattggagaaaccgatgattatatgttcttcgttataaagaattcgggaagagtattcgccccaaaggatactgaatcagtcttcgaagcatgcgtcactatgataaacacgttagagtttatacactctcgaggatttacccatggaaaaatagaaccgaggaatatactgattagaaataaacgtctttcactaattgactattctagaactaacaaactatacaagagtgaaaactcacatatagattacaacgaggacatgataacttcaggaaatatcaattatatgtgtgtagacaatcatcttggagcaacagtttcaaaacgaggagatttagaaatgttgggatattgcatgatagaatggttcggtggcaaacttccatggaaaaacgaaagtagtataaaagtaataaaacaaaaaaaagaatataaaaaatttatagctactttctttgaggactgttttcctgaaggaaatgaacctctggaattagttagatatatagaattagtatacacgttagattattctcaaactcctaattatgacagactacgtaaactgtttatacaagattgaaattatattctttttttatagagtgtggtagtgttacggatatctaatatttaatattagactatctctatcgcgctacacgaccaatatcgattactatggatatcttcagggaaatcgcatcttctatgaaaggagagaatgtatttatttctccagcgtcaatctcgtcagtattgacaatactgtattatggagctaatggatcaactgctgaacagctatcgaaatatgtagaaaaggaggagaacatggataaggttagcgctcaaaatatctcattcaaatccataaataaagtatatgggcgatattctgccgtgtttaaagattcctttttgagaaaaattggcgataagtttcaaactgttgacttcactgattgtcgcactatagatgcaatcaacaagtgtgtagatatctttactgaggggaaaatcaatccactattggatgaaccattgtctcctgatacctgtctcctagcaattagtgccgtatactttaaagcaaaatggttgacgccattcgaaaaggaatttaccagtgattatcccttttacgtatctccgacggaaatggtagatgtaagtatgatgtctatgtacggcaaggcatttaatcacgcatctgtaaaggaatcattcggcaacttttcaatcatagaactgccatatgttggagatactagtatgatggtcattcttccagacaagattgatggattagaatccatagaacagaatctaacagatacaaattttaagaaatggtgtgactttatggatgctatgtttatagatgttcacattcccaagtttaaggtaacaggctcgtataatctggtggatactctagtaaagtcaggactgacagaggtgttcggttcaactggagattatagcaatatgtgtaattcagatgtgagtgtcgacgctatgatccacaaaacgtatatagatgtcaatgaagagtatacagaagcagctgcagcaacttgtgcactggtgtcagactgtgcatcaacaattacaaatgagttctgtgtagatcatccgttcatctatgtgattaggcatgttgatggaaaaattcttttcgttggtagatattgctctccgacaactaattgttaaccattttttttaaaaaatagaaaaaacatgtggtattagtgcaggtcgttattcttccaattgcaattggtaagatgacggccaactttagtacccacgtcttttcaccacagcactgtggatgtgacagactgaccagtattgatgacgtcagacaatgtttgactgaatatatttattggtcgtcctatgcataccgcaacaggcaatgcgctggacaattgtattccacactcctctcttttagagatgatgcggaatcagtgttcatcgacattcgcgagctggtaaaaaatatgccgtgggatgatgtcaaagattgtgcagaaatcatccgttgttatataccggatgagcaaaaaaccatcagagagatttcggccatcatcggactttgtgcatatgctgctacttactggggaggtgaagaccatcccactagtaacagtctgaacgcattgtttgtgatgcttgagatgctaaattacgtggattataacatcatattccggcgtatgaattgatgagttgtacatcttgacattttcttctttcttctcttctcccttcctccctcttctccctttcccagaaacaaactttttttacccactataaaataaaatgagtatactacctgttatatttctttctatatttttttattcttcattcgttcagacttttaacgcgtctgaatgtatcgacaaagggcaatattttgcatcattcatggagttagaaaacgagccagtaatcttaccatgtcctcaaataaatacgctatcatccggatataatatattagatattttatgggaaaaacgaggagcggataatgatagaattataccgatagataatggtagcaatatgctaattctgaacccgacacaatcagactctggtatttatatatgcattaccacgaacgaaacctactgtgacatgatgtcgttaaatttgacaatcgtgtctgtctcagaatcaaatatagattttatctcgtatccacaaatagtaaatgagagatctactggcgaaatggtatgtcccaatattaatgcatttattgctagtaacgtaaacgcagatattatatggagcgggcatcgacgccttagaaataagagacttaaacaacggacacctggaattattaccatagaagatgttagaaaaaatgatgctggttattatacatgtgttttagaatatatatacggtggcaaaacatataacgtaaccagaattgtaaaattagaggtacgggataaaataataccttctactatgcaattaccagatggcattgtaacttcaataggtagtaatttgactattgcatgcagagtatcgttgagacctcccacaacggacaccgacgtcttttggataagtaatggtatgtattacaaagaagatgatggggacggaaacggtagaataagtgtagcaaataaaatctatatgaccgataagagacgtgttattacatcccggttaaacattaatcctgttaaggaaaaagatgctacaacgtttacgtgtatggcgtttactattcctagcatcagtaaaacagttactgttagtataacgtgaatgtatgttgttacatttccatgtcaattgagtttataagaatttttatacattatcttccaacaagcaattgacgaacgtattgctatgattaactcccacgatactatgcatattattaatcattaacttgcagactatacctagagctattttgacatactcgtgttcttgtgtaattgcagtatctatattattaaagtacgtaaatctagctatagttttattatttaattttagataatataccgtctccttatttttaaaaattgttacatcctttattaaatcattaatgggaatttctatgtcatagttaatatattgtgaacaacaagagcagatatctataggaaagggtggaatgcgatacattgatctatgtagttttaaaacacacgcaaactttgaagaatttatataaatcattccatcaatacatccttctatgttgagatgtatatatccaggaattcgtttattaatatcgggaaatgtataaactaaaacattgcccggaagcggagcttctaccggagttatatcagtttttaacttacaaaatgtaaccaatacctttgcatgacttgttttgttcggcaacgttagtttaaacttgacgaatggattaattacaatagcatgatccgcgcatctattaagtttttttactttaacgcccttgtatgtttttacagagactttatctaaatttctagtacttgtatgtgttataaatataacgggatatagaaccgaatcacctaccttagatacccaattacattttatcagatccagataataaacaaattttgtcgccctaactaattttatattgttatatattttacaattggttatgatatcatgtaataacttggaatctaacgcacatcgtcgtacgtttacacaattgtgatttagtgtagtatatctacacatgtatttttccgcgctatagtattctggactagtgataaaactatcgttatatctgtcttcgatgaactcatcgagatattgctctctgtcatatttatacacctgcataaactttctagacatcttacaatccgtgttattttaggatcatatttacatatttactggtataaagatgttagattagttaatgggaatcgtctataataatgaatattaaacaattatatgaggacttttaccacaaagcatcataaaaatgagtcgtcgtctgatttatgttttaaatatcaaccgcaaatcaactcataaaatacaagagaatgaaatatatacatattttagtcattgcaatatagaccatacttctacagaacttgattttgtagttaaaaactatgatctaaacagacgacaacatgtaactgggtatactgcactacactgctatttgtataataattactttacaaacgatgtactgaagatattattaaatcatgacgtaaatgtaacgatgaaaaccagtagcggacgtatgcctgtttatatattgcttactagatgttgcaatatttcacatgatgtagtgatagatatgatagacaaagataaaaaccacttattacatagagactattccaacatattactagagtatataaaatctcgttacatgttattaaaggaagaggatatcgatgagaacatagtatccactttattagataagggaatcgatcctaactttaaacaagacggatatacagcgttacattattattatttgtgtctcgcacacgtttataaaccaggtgagtgtagaaaaccgataacgataaaaaaggccaagcgaattatttctttgtttatacaacatggagctaatctaaacgcgttagataattgtggtaatacaccattccatttgtatcttagtattgaaatgtgtaataatattcatatgactaaaatgctgttgacttttaatccgaatttcaaaatatgtaataatcatggattaacgcctatactatgttatataacttccgactacatacaacacgatattcttgttatgttaatacatcactatgaaacaaatgttggagaaatgccgatagatgagcgtcgtataatcgtattcgagtttatcaaaacatattctacacgtccggcagattcgataacttatttgatgaataggtttaaaaatataaatatttatacccgctatgaaggaaagacattattacacgtagcatgtgaatataataatacacaagtaatagattatcttatacgtatcaacggagatataaatgcgttaaccgacaataacaaacacgctacacaactcattatagataacaaagaaaattccccatataccattaattgtttactgtatatacttagatatattgtagataagaatgtgataagatcgttggtggatcaacttccatctctacctatcttcgatataaaatcatttgagaaattcatatcctactgtatacttttagatgacacattttacaatagacacgttaggaatcgcaattctaaaacgtatcgatacgcattttcaaaatacatgtcgtttgataaatacgatggtataataactaaatgtcataaagaaacaatattgctcaaactatccactgttctagacactacactatatgcagttttaagatgccataattcgaaaaagttaagaagatacctcaacgagttaaaaaaatataataacgataagtcctttaaaatatattctaatattatgaatgagagataccttaatgtatattataaagatatgtacgtgtcaaaggtatatgataaactatttcctgttttcacagataaaaattgtctactaacattactaccttcagaaattatatacgaaatattatacatgctgacaattaacgatctttataatatattgtatccacctaccaaagtatagttgtatttttctcatgcgatgtgtgtaaaaaaactgatattatataaatattttagtgccgtataatgaagatgacgatgaaaatgatggtacatatatatttcgtatcattatcattattgttattgctattccacagttacgccatagacatcgaaaatgaaatcacagaattcttcaataaaatgagagatactctaccagctaaagactctaaatggttgaatccagcatgtatgttcggaggcacaatgaatgatatagccgctctaggagagccattcagcgcaaagtgtcctcctattgaagacagtattttatcgcacagatataaagactatgtggttaaatgggaaaggctagaaaaaaatagacggcgacaggtttctaataaacgtgttaaacatggtgatttatggatagccaactatacatctaaattcagtaaccgtaggtatttgtgtaccgtaactacaaagaatggtgactgtgttcagggtatagttagatctcatattaaaaaacctccttcatgcattccaaaaacatatgaactaggtactcatgataagtatggcatagacttatactgtggaattctttacgcaaaacattataataatataacttggtataaagataataaggaaattaatatcgacgatattaagtattcacaaacgggaaagaaattaattattcataatccagagttagaagatagtggaagatacaactgttacgttcattacgacgacgttagaatcaagaatgatatcgtagtatcaagatgtaaaatacttacggttataccgtcgcaagaccacaggtttaaactaatactagatccaaaaatcaacgtaacgataggagaacctgccaatataacatgcactgctgtgtcaacgtcattattgattgacgatgtactgattgaatgggaaaatccatccggatggcttataggattcgattttgatgtatactctgttttaactagtagaggcggtatcaccgaggcgaccttgtactttgaaaatgttactgaagaatatataggtaatacatataaatgtcgtggacacaactattattttgaaaaaacccttacaactacagtagtattggagtaaatacacaatgcatttttatatacattactgaataattattattattatttatatcgtatttgtgctatagaatgaatgaggatacgcgactatctaggtatttgtatctcactgatagagaacatataaatatagactctattaaacagttgtgtaaaatatcaaatcctaatgcatgttatagatgtggatgtacggctttacatgagtacttttataattatagatcagttaacggaaaatacaagtatagatacaacggttactatcaatattattcatctagcgattatgaaaattataatgaatattattatgatgattatgatagaactggtatgaacagtgagagtgagagcgagagtgataatatatcaatcaaaacagaatatgagaatgaatatgaattctatgatgaaacacaagatcaaagtacacaactagtaggttacgacattaaactcaaaaccaatgaggatgattttgtggatgaattttatggctatgatagatcagtgggtgtccatgattatatagatgaatcaattaataaagtagtatatggaagagagtctcacgtaagatggcgggatatatggcaagaacataatgatggcgtatacagtataggaaaggagtgcatagataatatatacgaagacaaccataccgtagacgaattctacaagatagacagcgtatcagatgtagatgacgcggaacacatatctccgataactaatgatgtatctacacaaacatgggaaaagaaatcagagttagatagatacatggaaatgtatcctcgtcatagatatagtaagcattctgtctttaagggattttctgacaaagttagaaaaaatgatttagacatgaatgtggtaaaagaattactttctaacggtgcatctctaacaatcaaggatagcagtaataaggatccaataaccgtttattttcgaagaacgataatgaatttagaaatgattgatattattaacaaacatacaactattgatgaacgaaagtatatagtacactcctatctaaaaaattataaaaatttcgattatccatttttcaggaagttagttttgactaataaacattgtctcaacaattattataatataagcgacagcaaatatggaacaccgctacatatattggcgtctaataaaaaattaataactcttaattacatgaagttattagtgtataacggaaatgatataaacgcacgaggtgaagatacacaaatgcgaactccattacacaaatatttgtgtaaatttgtatatcataatattgaatatggtgtccgatactataatgaaaagattatagacgcatttatagagttaggagccgatctaactattccaaataacgatggaatgataccagtagtttactgtatacactcaaatgcagaatatggttataacaatattactaacataaagataatacgtaaactacttaatcttagtagacgtgcgtcacataatctatttagagatcgagtcatgcacgattatataagtaatacatatattgatcttgagtgtttagatattattagatcgttggatggattcgatatcaatggttactttgaaggacgtacaccacttcattgcgctatacaacataacttcactcagattgctaagtacttattagatcgaggagctgatatatcattaaagacagacgatggtaaaactgtatttgatttatcgttatgtagttacatccctcttaaatggactagctttttgattagtcgtctaccgcctaaaagtgtcatatgctcactgactaaccatataatagattatgttcttacgaacaatagacgtattatttggcagagtcaaatgattaataagtacgtactgttactggacccatccttttattctagatttagaaatgctatcgaaagcaaattaaaccaacacgctaatcgttataataggttcgaacacgatagagatcgcgttaatgaaaattatgacaaagtcttacatgacatagacatatatattaaggatgtacaaatattaaaatctatttccatcactaataatataacactatacgatactattataaataagtcagagtttcctatacgtcgtgcaaatgacaaacaattaattaataaaataaaatccaatatatatcataatcttatcgaaaaagttattaaaaatgcattagagaaatgcactctgactaatgccgtcctcgagtatatgatgtcatctcgatctcaatcatcttatttgagtcgtattcctaatgagatattactcgaaatattatataaactcgacatgtacgatttacgtaatctatatacaagatatatgagagagaatgatatcacagagtatcatatagagaatacgaggtctgtttctacacagacatgaataatgaatacacactacaacgtttttttttaaaatcttagatataacactaaaattacatcaagattataatattgaaatcgtaatttgagttgtttgataatcatggatatcaaaaatgatatacgtaacattagcaatcttttagatgatgatatattatgcgatgtaatcataactatcggagatggagaagaaattaaggcgcataaaactatcttggctgccggatctacgtattttaaaacaatgttcacgacacctatgatagcgagagatctagtaactagagtaaatctacagatgtttgataaagatgtcgttaaaaatattgtacagtacttatacaataggcatataagttctatgaatgtaatagacgtattaaaatgcgccgactatcttctaatcaatgatctagtcactaactgtgaatcctatattaaagattatattaatcatgatatataccataagttatatgagatggttcatattccaatagtcaaatatattaaacgtatgctgataagtaatataccaacattgataactacgaacgcatttaaaaaaacagtatttgaaatattattcgatattatttctactaacgacagtgtatatttatacagagaaggatataaagtgacgatactattgaagtggctagaatacaactacatcaccgaagaacagctgttgtgtatactgtcctgtatagatatacaaaatctagataaaaagtctagactactactctattcgaataaaactataaatatgcatccttcgtgtatacaatttctattagataataaacagaatagaaacattataccccaccagttatgtttagcgtgtcatgatactaactataatgtatgtaacccgtgtatagtagtgtataacattaatactatggaatatagtgttatttccaccattcctaatcacataattaattacgcatccgcaattgtagataatgacataataatagctagaggatataactttaataatccatcattaaacaaggtatataaaataaacattgagaacaaaatacatgtagaactcccacccataataaaaaatagatgtcgtttttcattggctgtaatcgatgacacaatttatgctataggtggtcaaaacggtacgaacgtagaacgaactatagaatgttatacaatgggtgatgataagtggaagatgttacccaatatgcccatagcattatctagttatggcatgtgtgtattagatcaatacatatacattataggcggtcgtacccaacacattgattatacatcagtgcatacagtaaatagcatagatatggaggaggatacaaatatttcaaataaagttatgagatacgacactgtcaataatatatgggaaacattacctaacttctggactggaactataaatccaggcgtggtctcgcataaagatgatatatatgttgtatgcgacatcaaagatgaaaaaaatgttaaaacttgtatatttagatataacacgaatacgtataacggatgggaattggtcacgacgacagaaagcagattatcagctctgcatactattctttataacaataccataatgatgttacattgttatgaatcgtatatgttacaagatacatttaatgtgtacactcgcgaatggaatcatatgtgtcatcaacattcgaatagttatatcatgtacaatatactacccatctactaaatataatagaataaaataaatgagtatgatcattttagataacgattgattttatcattaccgcttcattcttatattctttgcttacggaacctatatttagaaacatctactaacgattttttatgcttgcattattaatggtatgtaatatgattgattgtgtacgcaataccaatttgttaagtatgaatacggggtacaaacataaactgaaatttaacattatttatttatgatatatatcgttatcgttatcgttatcgttatcgttatcgttattgtttggtctataccatggatatctttaaagaactaatcttaaaacacacggatgaaaatgttttgatttctccagtttctattttatctactttatctattctaaatcatggagcagctggttctacagctgaacaactatcaaaatatatagagaatatgaatgaaaatacacccgatgataagaaggatgacaataatgacatggacgtagatattccgtattgtgcgacactagctaccgcaaataaaatatacggtagcgatagtatcgagttccatgcctccttcctacaaaaaataaaagacgattttcaaactgtaaactttaataatgctaaccaaacaaaggaactaatcaacgaatgggttaagacaatgacaaatggtaaaattaattccttattgactagtccgctatccattaatactcgtatgacagttgttagcgccgtccattttaaagcaatgtggaaatatccattttctaaacatcttacatatacagacaagttttatatttctaagaatatagttaccagtgttgatatgatggtgggtaccgagaataacttgcaatatgtacatattaatgaattattcggaggattctctattatcgatattccatacgagggaaactctagtatggtgattatactaccggacgacatagaaggtatatataacatagaaaaaaatataacagatgaaaaatttaaaaaatggtgtggtatgttatctactaaaagtatagacttgtatatgccaaagtttaaagtggaaatgacagaaccgtataatctggtaccgattttagaaaatttaggacttactaatatattcggatattatgcagattttagcaagatgtgtaatgaaactatcactgtagaaaaatttctacatacgacgtttatagatgttaatgaggagtatacagaagcatcggccgttacaggagtatttatgactaacttttcgatggtatatagtacgaaggtctacataaaccatccatttatgtacatgattaaagacaacacaggacgtatactttttatagggaaatactgctatccgcaataaatataaacaaatagacttttatcacgtttatctatgtctaaatattacaaatagtaatagtataaactaaagctgataatacattaaaacttaaaaaaataataatatcatttacaattaatagtataaactaaaaattaaacaaatcgttattataagtaatatcaaaatgatgatatacggattaatagcgtgtcttatattcgtgacttcatccatcgctagtccactttatattcccgttattccacccattacggaagataaatcgttcaatagtgtagaggtattagtttccttgtttagagatgaccaaaaagactatacggtaacttctcagttcaataactacactatcgataccaaagactggactatcggcgtactatccacacctgatggtttggatataccattgactaatataacttattggtcacggtttactataggtcgtgcattgttcaaatcagagtctgaggatattttccaaaagaaaatgagtattctaggtgtttctatagaatgtaagaagtcgtcgacattacttacttttttgaccgtgcgtaaaatgactcgagtatttaatagatttccagatatggcttattatcgaggagactgtttaaaagccgtttatgtaacaatgacttataaaaatactaaaactggagagactgattacacgtacctctctaatgggggttgcctgcatactatcgtaatggggtcgatggttgattattgattagtatattccttattctttttattcacacaaaaagaacatttttataaacatgaaaccactgtctaaatgtaattatgatcttgatttatagatgaagatcagcctttagaggattttaaccagtatgtttaatatgaaaaaaataaacataacatattttgagattaagcgctattgtgcttaattattttgctctataaactgaatatatagccacaattattgacgggcttgtttatgaccggcaatcatgaatttacagaaattatctctggctatatatcttactgcgacatgttcgtggtgttatgaaacatgcataagaaaaactgcgttgtatcatgacattcaattggagcatgtagaagacaataaagatagtgtagcgtcgctaccgtacaagtatctacaagtagtcaatcaaagagaacgtagtagattgttggctacatttaattggacagatatagctgagggtgttagaaatgagttcattaaaatatgtgatatcaacggaacatatttatataattatactattgctgttagtataattattgattccacggaagaactaccaacagttactccaattacaacaacatatgaaccttctacatataattatactatcgatgatagcactgttattactactgaagaactacaagtaactccatcaccaactccaacatatgcacatgtaacaactcctcttccaacatcagcagttccttatgatcaacgatcgaataacaatgtaagcactatatctattcaggtactgagtaaaatattgggagtcaatgaaacagaattaactaattatcttattacgcataaaaatgccacggttgacaataacaccatggtcaatgatgaaacatctgacaataacacattgcatggtaatataggatttttggaaataaataattgttacaatgtttctgtatcagatgctagttttagaataacattagtaaacgatacttctgaagaaattttgctaatgctaacaggaactagttcatccaacacctttatatcttccaccaatatcactaaatgtttgaaaacattaatcaataatgcgtcaattaatgatgtacttataacacaaaatatgaatgtaacatctaattgtgataaatgctcaatgaatttgatggcatccgttattcctgcagttaatgaatttaacaatacgttgatgaaaattggtgtaaaaaatgatgaaaacaatacggtatataaatattataattgtaaactaactacaaattctacgtgtgatgagttaatcaatttagatgaagtcattaacaacataactctaacaaatattatacgcaatagtgtttcaataactaacagcaggaaaagacgagatttgaatggtgagtttgaattttccacttccaaggaattagattgtctttacaaatcatatggtgtaaacgaggatgtaagtcattgttttgcatcacctagacgtaaacgatctgacgacaaaaaggagtacatggacatgaaattattcgaccacgcgaaaaaagatttaagaatagacagtgttattcctaaaggtacaactcatttccaagtaggtacatctggtgcaagtggtggtgttgtaggagataggtccccatttcaaaatgttaaatcacgtgcaagtctattggcggaaaaaataatgcctagagtacctactactgctaccgaagagcagctatatgcaactgtaaataaacaaaccaagttgcctgcaggtgttaaaagtactccgtttacagaggctcttgtgtctacgataaaccaaaagctttctagtgctaaagaggtaacttatgcttcgctcaatctgccaggatcaagtggctatgttcatagaccatctgattctgttatttacagcagtataagacggtcacgtttacctagtgatagtgatagtgattatgaagatatacaaactgttgttaaggaatataatgaaagatatggtagaccagtcagtaaaacacagttatcaagtagtgaaagtgattttgaagatatagatactgttgttagagaaattaaacaacaaaaatatggtggagctagccgtgttagaacatcatcaagtagtagtgattttgaagatatgaatactgttgttagggaatatagacaaaaatatggcaatgcaatggcaaaaggacgtagtagttcccctaaacctgatccattatatagtactgttaagaaaacaactaaaagtctatcaggtggtgtagacatagttacaaaacaatcagactattctctattacctgacgttaatactggtagttctattgtgtcacctctcaccagaaaaggagctactagacgccctacaaatgatggtctacagagtccaaatcctcctccccgtaatccccgtcgaccacttcctcaacatgatgattattctcctccacaagttcctcagcgcgattattctcctccgcgcagacctccgccacttcctcctaaaccagtccaaaatccgccacgacttccccctagaccagcaggtcaattacctcctatagatcaaccagataaaggatttagtaagtttgtatcacctagacggtgtagaagagcaagctctggagtcatatgtggtatgatacaatcaaaaccaaacgatgatacctatttacttcttcaacggccaaaacttgaaccagaatatgcggaggtcggtaatggtatacccaagaacaatgttcctgtaataggtaataaacatagtaaaaaatatacatcggcgatgttaaaaatatcaacaaaatttgataaatctacggcatttggagcagcaatgttactaactggtcagcaggccattagccaacagactagatcaactgcgttaagtagaaaagatcagatgagcaatgaagaaaagatattcgaagcagttacaatgagtctatcaactataggttcaacgttgacgtctgcgggtatggcgggcggtccaaaactaatgattgcaggaatggctataacggctataactggtataatagatacgataaaagatatatattacctgttttcaggacaggagaggccggcagatcctgttattaaattatttaatacatacgctggcttattatccgatagtaataaaatgggggtaagaaaatgtttgacgcccggtgacgacacacttatttatattgcatacagaaacgatagcagttttaaacatagtacggatgcgatggctttgtatttcttagatgttatcgactcagagatcctatatctaaacacatcaaatttagttctagagtatcaactaaaggtggcttgtcccataggaacattaagatctgtagatgtggacataactgcgtatacaatattatatgatacagcggataatattaagaaatacaagtttatcagaatggcaacgctactatccaaacatccagttattagattgacatgtggtttagcagcaacattggtaattaaaccgtacgaggtacccattagtgatatgcaactactaaaaatggcgacgcctggtgaaccagaatccactaggtctataccatctgatgtctgtgataggtatcctctaaagaaattctatcttttggctggtggttgtccctatgatacatctcaaacttttattgtacatactacttgcagtattctactaaaaacagctacacgtgatcagtttagaaacagatgggtgttacaaaatccatttagacaagaaggggaatataagcaactgtttacctttagcaaatacgattttaacgacaccataatcgatcctaatggtgtggcgggtcatgctagcttttgtaccaataaaagcagcaaccaatgtttctggtccgaacctatgatattggaagatgtatcatcgtgtagttctagaactagaaaaatatacgtaaaactgggaatatttaatgctgaaggttttaatagttttgtactaaactgtccaactgggtctacacctacatacatcaaacataaaaatgcggacagtgacaatgttatcatagagctacctgtaggtgattacggcacagccaaattgtattcagcaacaaaaccgtcgaggatagctgtgttttgcacacataactatgataaacgattcaaatcagatattatagttctaatgtttaataaaatcagcggtgttccattttggagcatgtacacaggaagtgtaactagtagaaatagaatgtttaccacattgtctagaggaatgccgtttagatcaacgtattgcgataacagacgacgatcaggttgttattatgcaggaataccatttcatgaagatagtgtagaagcagatctacattatggaccaaaaataatgttaaaggaaacatatgacacaaacagtattgacccacgagttataacaaagtcaaagacgcactttcctagtccaataagtgtaaaattcatggctgacaatttaggaaatggatatgacaaccctaattcattttgggaagatgctaaaactaagaaacggacatatagtgcaatgacgataaaagttctaccatgtacagtgagaaataaaaatatagactttggatataactatggagatattatttctaatatggtttatctacaatctactagtcaggattatggagatggtaccaaatatacatttaaatccgtaactagatcagatcatgagtgtgaatctagcttagatctgacgtctaaggaagtaactgtgacatgtcctgcgtttagtataccaagaaatatatcaacgtatgaaggtctatgctttagtgttactacatctaaagatcattgtgctacaagtaataatgggttaaaatcttctggctatggaaaggaagatgctgttaaaccacgtgcctgctttcatcattggaattattacacactgtcgttggattattactgttcatacgaagatatttggagaagcaactggcctgactatgatccatgtaagtcatatatccatatagagtatagagatacatggatagaatctaacgtgttacagcaacctccttacacatttgaattcactcatgacaattctaacgaatatgtggataaagaaattagtaacaaattaaatgatctgtacaatgcatacaagaagattatggaatatagcgacggatcattgccggcgtctataaacagattagcaaaagcattgacttcagagggtagagaaatagcaagtgttaatatagatggtaatctgttagatatcgcatatcaagcagataaggaaaagatggccgacatacagacaaaaataaatgacatcaccagagacttatttatgcacactctatcagacaaagatataaaagacattatagaatccgaagaaggtaagagatgttgtataatagatgttaagaacaatcgtgttgaaaagtactatcctattgataattatctatgtggtactttagatgattatatatacacctctgtagaatataacaaatcctatgtgttagtaaacgatacttatatgagctacgactatcttgaatcatcaggtatagttgttctatcatgttatgaaatgactataatctccttggatacaaaagacgccaaagatgctatagaagatgtgatagtagcaagtgcggtagccgaagcattgaatgacatgtttaaggaatttgataaaaacgtaagtgctattataataaaagaagaagataattatctaaacagttcgccggatatctaccatataatatatatcataggtggcactattctgctactgttagtcattattttaatattggcaatttatatagcgcgcaataaatacaaaaccaggaaatataaaataatgaaatatgacaataggagcattaaatctgagcatcatgatagtcttgaaacagtgtctatggaaattattgataatcggtactaataaaatagtttaactcttttaaaaccagtttggtactggaatttcagttcattactcgttgagaaattgatgatttttttaaaatgatattacttttatatgcttgcatcgcagaatgatattcacaagtattattaaaaatgagtatcggtagttacattaccatatcatccatgctcatatggatctccatccattatataatcaatgatacatgtattaaaatactttccgaataagtcttttaaatattgtattaattatgaaaaactatgctatgcgagtatgatgcaaagatgtttaatgatacgatactagattttatctctagcgagagatgtcgttagaatcatttatcataactacgtttaataataattcatcaacgaatatcgataacatgtgtcatttatactttaaatacgttaaagtctgtccgtcttctctattgtttagactgtttgtagaatgctgtgatataaacaaactagtagaaggtacgactccgttacactgttatctaatgaatgaaggatttgaatcatctgttttaaaaaacctattaaaggagtatgtcatgaatacgtttaatgttcatgacagtgatggtcacattccattacacaaatatttaactcatgatgaagttgagaatgatatctttgatatgctttctgatagtatagatagctttagctaatataaaaatatattaatccactatatattctagacttgatttaaaaccgataaactactactacgtactgtataagttgttaaaaaaaggagcagaccctaattatgtagatgatagaggtaatacttttcttcattacttctgcatctatatgtccacttatgagaaaacgtcatttaataagatgcatcgtgaaaagaaatttattaaagagttggtaaaatatgaaaccgatattaataaagtaaataatataggaaatacacctctacataactacgtatctcaatatgatatcactctcattcctcatccacaacccattaaaaaaatggaaattaaagccctctattagc

SEQ ID NO: 24 - DNA, 8484 bp, Horsepox virus
taaaatagtttaactcttttaaaaccagtttggtactggaatttcagttcattactcgttgagaaattgatgatttttttaaaatgatattacttttatatgcttgcatcgcagaatgatattcacaagtattattaaaaatgagtatcggtagttacattaccatatcatccatgctcatatggatctccatccattatataatcaatgatacatgtattaaaatactttccgaataagtcttttaaatattgtattaattatgaaaaactatgctatgcgagtatgatgcaaagatgtttaatgatacgatactagattttatctctagcgagagatgtcgttagaatcatttatcataactacgtttaataataattcatcaacgaatatcgataacatgtgtcatttatactttaaatacgttaaagtctgtccgtcttctctattgtttagactgtttgtagaatgctgtgatataaacaaactagtagaaggtacgactccgttacactgttatctaatgaatgaaggatttgaatcatctgttttaaaaaacctattaaaggagtatgtcatgaatacgtttaatgttcatgacagtgatggtcacattccattacacaaatatttaactcatgatgaagttgagaatgatatctttgatatgctttctgatagtatagatagctttagctaatataaaaatatattaatccactatatattctagacttgatttaaaaccgataaactactactacgtactgtataagttgttaaaaaaaggagcagaccctaattatgtagatgatagaggtaatacttttcttcattacttctgcatctatatgtccacttatgagaaaacgtcatttaataagatgcatcgtgaaaagaaatttattaaagagttggtaaaatatgaaaccgatattaataaagtaaataatataggaaatacacctctacataactacgtatctcaatatgatatcactctcattcctcatccacaacccattaaaaaaatggaaattaaagccctctattagcatagacggctacaggtctaccatcaggttaaccttcgtctacctttacaatggcctttccttgtgcccagttcagaccctgtcattgccacgctactaaggactccctgtataccgtggccgacgtcagacattgtctgactgaatacatcctgtgggtttctcatagatggacccatagagaaagcgcagggtctctctacaggcttctcatctctttcagaactgatgcaacggagctctttggtggtgagttgaaggagttctcggattcacttccgtgggacaatatcgacaattgcgtggagatcattaaatgtttcatcagaaatgactccatgaaaaccgccgaagaacttcgtgcaatcattggactttgtactcaatcagctatcgtctctggaagagtcttcaacgataagtatatcgacatactacttatgctgcgaaagattctgaacgaaaacgactatctcaccctcttggatcatatccgcactgctaaatactaaatctccttcatgctctctcactaatactcttactttctcactcactcactcactacactttttatcacacccaccttactttttatcatcttatgaggaatgattgccttcatcatttttcgtgaaatataatataggaataattagcaccagaatagctatggattgcgtcagagattgcacatgtattctatgtcgtctactggatgaagatgtgacgtacgaaaaaataaaactagaaattgaaacgtgtcacaacttatcaaaacatatagatagacgaggaaacaatgcgctacattgttacgtcttcaataaatgcgatacagacattaagattgttcggctgttactctctcgcggagtcgagagactttgtagaaacaacgaaggattaactccgctaggagtatacagtaagcatagatacgtcaaatctcaaattgtgcatctactgatatccagctattcgaattcctctaacaaactcaagtcgaatataaatgatttcgatctgtattcgtatatgtcttcggataatatcgacttacgtctgctaaaatacctaattgtggataaacggatacgtccgtccaagaatacgaattatgcaaacaatagtctcggattggtggatatatacgtaacgacgcctaatccgagaccagaagtattgctatggcttcttaaatcagaatgttacagcaccggttacgtatttcgtacctgtatgtacaacagtgatatgtgtaagaactctcttcattactatatatcgtctcatagagaatctcaatctcaatctctatccaaggatgtaattaaatgtttgatcaataacaatgtttccatccatggcagagacgaaggaggatctttacccatccaatactactggtctttctcaaccatagatatagagattgttaaattattattaataaaggatgtggacacgtgtagagtatacgacgacgtcagtcagccctatattagaggcgtattagcggattatctaaacaagcgatttagagtaaccccatataatgtagacatggaaatcgttaatcttcttattgagagacgtcatactcttgtcgacgtaatgcgtagtattacttcgtacgattccagagaatataaccactacatcattgataacattctaaagagatttagacaacaggatgaatccatcgtacaagccatgttgataaactacttacattacggcgatatggtaagtatacctatcgttcgatgcatgttagataacggagcgaccatggataagacaacggacaacaactatcctctcacgactactttgttaataataatctcgtcgatgtaaacgtcgtaaggtttatcgtggaaaatatggacacgcggctgtaaatcacatatctaacaatggccgtctatgtatgtacggtctgatattatcgagatttaataattgcgggtatcactgttatgaaaccatactaatagatgtatttgatatactaagcaagtacatggataatatagatatgatcgataatgagaataaaactctactatattacgcggtcgatgtcaataatatacaatttgcaaagcggttattggaatatggagcgagtgttacaacatcacgctcgataatcaatacggccatccagaaaagcagttaccaaagagaaaacaaaacgaggatagttgatttattacttagctaccatcccactctagagactatgattgacgcatttaatagagatatacgctatctatatcctgaaccattatcggcatgtatcagatacgccttaatcatagatgatgattttccttctaaagtaagtatgatatcgccggtcatcataaggaactaaagcgctatagagtagacattaatagaatgaagaatgcctacatatcaggcgtctccatgtttgatatattatttaaacgaagcaaacgccacagattgagatacgcaaagaatccgacatttataaactttgtatccaacatcaaatggtacaaaaaagaactaacgtccatcattacagaaactgtaaagaacaatgagaggatcgactccatagtggacaacattaatacagacgataacttgatttcgaaattacccatggagatacaactcgagatactttattactccattaaataatttatcatggagcgataatgtcctgtttcatttgtttccatgacatattacaaaatcgattccgtccaagatgataaaaacatttaccggcatcataaacacggagtttattttatatgtctcgcataaacattactaaaaaatatattgttcggttttctttttctttcacatctttaattatgaaaaagtaaatcattatgagatggatgaaatggacgagattgtacgcatcgttcgcgacagtatgtggtacatacctaacgtatttatggacgacggtaagaatgaaggtcacgtttctgtcaacaatgtttgtcatatgtattttacgttctttgatgtggatacatcgtctcatctgtttaagctagttattaaacactgcgatctgaataaacgactaaaatgtggtaactctccattacattgctatacgatgaatacacgatttaatccatctgtattaaagatattgttacaccacggcatgcgtaactttgatagcaaggatgaaaaaggacatattcctctacaccactatctgattcattcactatcaatcgataacaagatctttgatatactaacggacaccattgatgactttagtaaatcatccgatctattgctgtgttatcttagatataaattcaatgggagcttaaactattacgttctgtacaaattattgactaaaggatccgaccctaattgcgccgacgaggatgaactcacttctcttcattactactgtaaacacatatccacgttctacaaaagcaattattacaagtcaagtcacactaagatgcgagccgagaagcgattcatctacgcgataatagattatggagcaaacattaacgcggttacaaaaatcggaaatacgccgttacacacttaccttcaacagtataccaaacatagtcctcgtgtggtgtatgctcttttatctcgaggagccgatacgaggatacgtaataatcttgattgtacacccatcatggaatacataaagaacgattgtgcaacaggtcatattctcataatgttactcaattggcacgaacaaaaatacgggaaattacaaaaggaagaaggacaacatctactttatctattcataaaacataatcaaggatacggaagttacactctcaatatactacggtatctactaaataggttcgacattcagaaagacgaatactataataccatgactcctcttcataccgcctttcaaaattgtaacaacaatgttgcctcatacctcgtatacatcggatacgacatcaaccttccgactaaagacgataagacggtattcgacttggtgtttgaaaacagaaacatcatatacaaggcggatgttgtgaatgacatcatccaccacagactgaaagtatctctacctatgattaaatcgttgttttacaagatgtcagaattctctccctacgacgattactacgtaaaaaagatactagcctactgcctattaagggacgagtcattcgcggaactacatagtaaattctgtttaaacgaggactataaaagtgtatttatgaaaaatatatcattcgataagatagattccatcatcgaaaaatgcagtcgtgacataagtcgccttaaagagattcgaatctccgacaccgacctgtatacggtattaagaacagaagacatacggtatcacagctatcttaaagccatacattcagacagtcacatttcatttcccatgtacgacgatctcatagaacagtgccatctatcgatggagcgtaaaagtaaactcgtcgacaaagcactcaataaattagagtctaccatcgatggccaatctagactatcgtatttgcctccggaaattatgcgcaatatcataaccaagctaagcgactatcatctaaacagtatgttgtacggaaagaaccattacaaatattatccatgatagaaagaaaatatttaaaaaatatctatataattggagaagtaggaaacaagaacaagacaacgattactacattattaaattatgaagtccgtattatacttgtatatattgtttctctcatgtataataataaacggaagagatatagcaccgcatgcaccatccaatggaaagtgtaaagacaacgaatacaaacgccataatttgtgttgtttatcgtgtcctccgggaacatacgcttccagattatgcgatagcaagactaacacacaatgtacgccgtgtggttcgggtaccttcacatctcgcaataatcatttacccgcttgtctaagttgtaacggaagatgcgatagtaatcaggtagagacgcgatcgtgtaacactactcacaatagaatctgtgaatgctctcccggatattattgtcttctcaaaggatcatccggatgcaaggcatgtgtttcccaaacaaaatgtggaataggatacggagtatccggacacacgtctaccggagacgtcatctgttttccgtgtggtctcggaacatattctcacaccgtctcttccgcagataaatgcgaacccgtacccagaaatacgtttaactatatcgatgtggaaattaacctgtatccagttaacgacacatcgtgtactcggacgaccactaccggtctcagcgaatccatctcaacgtcggaactaactattactatgaatcataaagactgtaatcccgtatttcgtgaggaatacttctctgtccttaataaggtagcaacttcaggtttctttacaggagaaaatagatatcaaaatatttcaaaggtgtgcactctgaatttcgagattaaatgcaataacaaaaatttttcctccaaacagttaacgaaagcaaagaatgatgacggtatcatgccgcatttggagactgtaactctagtgggcgactgtctatctagcgtcgacatctatatactatatagtaataccaatactcaagactacgaaactgatacaatctcttatcatgtgggtaatgttctcgatgtcgatagccatatgcccggtagttgcaatatacataaactgatcactaattccaaacccacccactttttatagtaagtttttcacccataaataataaatacaataattaatttctcgtaaaagtagaaaatatattctaatttattgcacggtaaggaagtagaatcataaagaacagtactcaatcaatagcaattatgaaacaatatatcgtcctggcatgcatgtgcctggcggcagctgctatgcctgccagtcttcaatcattttcatcctcatcctcgtgtacggaagaagaaaacaaacatcatatgggaattgatgttattatcaaagtcacaaagcaagaccaaacaccgaccgatgataagatttgtcaatccgtaacggaagttacagagaccaaagacgatgaggtatccgaagaagttgtaaaaagagatcccaccacttattacagtatcgttggtgcgggtcttaacatgaactttggattcacaaaatgcccaaagattttatccatctctgaatcctctgacggaaacacggtgaatgctagattgtccagtgtgtccccaggacaaggtaaggactctcccgcgatcactcgtgaagaagctctggctatgatcaaagactgtgaggtgtctatcaacatcagatgtagcgaaaaagagaaagacagcgacatcaagacccatccagtactcgggtctaacatctctcataagaaagtgagttacgaagatatcatcggttcaacgatcgtcgatacaaaatgcgtcaaaaatctagagtttagtgttcgtatcggagacatgtgcaaggaatcatctgaacttgaggtcaaggatggatttaagtatgtcgacggatcggcatctaaaggtgcaaccgataatacttcactcatcgattcaacaaaactcaaagcgtgtgtctgaattgataactctattcatctgaaattggataagtagggttaatcgaacgattcaggcacaccacgaattaaaaaagtgtaccggacactatattccggtttgcaaaacaaaaatgttcttaactacattcacaaaaagttacatctcgttacttcttctttttctgtctcaatatgtgatacgatatgatcactattcctattcctattctctcttcgatggtctcataaaaaaagttttacaaaaatatttttattctctttctctcttcaatggtctcataaaaatattaaacctctttctgatgtttcaactatttcgtaaacgataacgtccaacaatatattctcgtagagattatcaatatccctatgcccatctaggttactagacaattgcatcataaaataatgtttataatttacacgttaacatcatataataaacgtatatagtataatattttttggcatataaatgatctagtaaaatccatataggggatactgctcacgttttttctttggtacaaaatttcacacaagtttttatacagacaaatattctcatccatatattttaaaacattaacttttgtactaagaaaaatattaaacctctttctgatggagtcgtaaaaaagttttatctctttctccttcgatggtctcacaaaaatattaaacctctttctgatggtctctataaagcgattgatttttcttaccctctagagtttcctacggtcgttggtcacaca

SEQ ID NO: 25 - DNA, 18525 bp, Vaccinia virus
tagggataacagggtaatgaagaagctcttcgccagaagctagcaagaggtttaatatttttgtgagaccatcgaagagagaaagagaataaaaatattttatgactccattgaagagagaaagagaaaatgagaatgagaataaaaatattttagtgacaccatcagaaagaggtttaatatttttgtgagaccatcgaagagagaaagagaataaaaatattttatgactccattgaagagagaaagagaaaatgagaatgagaataaaaatattttagtgacaccatcagaaagaggtttaatattttttatgagaccatcaaagagagaaagagaataaaaatatttttgtaaaactttttttatgagaccatcaaagagagaaagagaataaaaatatttttgtaaaactttttttatgagaccatcaaagagagaaagagaataaaaatatttttgtaaaactttttttatgagaccatcaaagagagaaagagaataaaaatatttttgtaaaactttttttatgagaccatcaaagagagaaagagaataaaaatatttttgtaaaactttttttatgagaccatcaaagagagaaagagaataaaaatatttttgtaaaactttttttatgagaccatcaaagagagaaagagaataaaaatatttttgtaaaactttttttatgagaccatcaaagagagaaagagaataaaaatatttttgtaaaactttttttatgagaccatcagaaagaggtttaatatttttgtgataccctgaaaggaaataggaataggaataggaatagtgtcataatcgtatcacactattgagacagaaaaagaagaagtcgcgagaggtaactttttgtgaatgtagttaagaacatttttgttttgcaaaccggaatatagtgtccggtacacttttttaattcgtggtgtgcctgaatcgttcgattaaccctactcatccaatttcagatgaatagagttatcgattcagacacacgctttgagttttgttgaatcgatgagtgaagtatcatcggttgcaccttcagatgccgatccgtcgacatacttgaatccatccttgacctcaagttcagatgattccttgcacatgtctccgatacgaacgctaaactctagattcttgacgcattttgtatcgacgatcgttgaaccgatgatatcttcgtaactcactttcttatgagagatgttagacccgagtactggatgggtcttgatgtcgctgtctttctcttcttcgctacatctgatgtcgatagacacctcacagtctttgatcatagcaagagcttcttcatgagtgatcgcgggagagtccttaccttgtcctggggacacgctggacaatctagcattcactgtgtttccatcagcggattctgagatggatttaatctgaggacatttggtgaatccaaagttcattctcagacctccaccgatgatggagtaataagtggtaggaggatctacatcctcgactgatgtggaatcatcttctgattccacctcgggatctggatctgactcggactctgtaatttccgttacggattggcaaatcttatcattggtcggtgtttggtcttgctttgtgactttgataataacatcgattcccatatgatgtttgttttcttcttccgtacacgaggaggaggattgctgaagactggcaggcacatgcatgccaggacgatatattgtttcatgattgctattgattgattactgttctttatgattctacttccttaccgtgcaataaattagaatatattttctacttttacgagaaattaattattgtatttatgggtgaaaaacttactataaaaagcgggtgggtttggaattagtgatcagtttatgtatatcgcaactaccgggcatatggctatcgacatcgagaacattacccacatgataagagattgtatcagtttcgtagtcttgagtattggtattactatatagtatatagatgtcgacgctagatagacagtctccgaatgcggcatgatagtatcattctttgctttcgttaactgtttggaggaagaatctttgttattgcatttaatctcgaaattcagagtgcacacctttctcctgtaaagaaacctgaagttgctaccttattaaggacagagaagtatccatcacgaaagacgggatcgcagtctttatgattcatagtaatagttagttccgacgttgagatggattcgctgagaccggtagtggtcgtccgagtacacgatgtgtcgttaactggatacaggttaatttccacatcgatatagttaaacgtatttctgggtacgggttcgcatttatctgcggaagagacggtgtgagaatatgttccgagaccacacggagaacagatgacgtctccggatactccgtatcctattccacattttgtttgggaaacacatgccttgcatccggatgatcctttgagaagacaataatatccgggagagcattcacagattctattgtgagtagtgttacacgatcgcatcttccgttacaacttagacaagcgggtaaatgattattgcgagatgtgaaggtacccgaaccacacggcgtacattgtgtgttagtcttgctatcgcataatctggaagcgtatgttcccggacacaaattatggcgtttgtattcgttgtctttacactttccatcggatggtgcatgcggtgctatatctcttccgtttattattatacatgagagaaacaatatatacgagtataatacggacttcataatttaataatgtagtaatcgttgtcttgttcctgtttcctacttctccaatcatatagatattttctttctatcatggataatatttgtaatggttctttccgtacaacatactgtttagatgatattgcgcataatttccggaggcaaatacgatagtctagattggccatcgatggtagactctaatttattgagtgctttgtcgacgagtttacttttacgctccatcgatagatggcactgttctatgagatcgtcgtacatgggaaatgaaatgtgactgtctgaatgtatggctttaagatagctgtgataccgtatacaggtcggtgtcggagattcgaatctctttaaggcgacttatgtcacgatgatggaatctatcttatcgaatgatatatttttcataaatacacttttatagtcctcgtttaaacagaatttactatgtagttccgcgaatgactcgtcccttaataggcagtaggctagtatcttttttacgtagtaatcgtcgtagggagagaattctgacatcttgtagaacaacgatttaatcataggtactttcagtctgtggtggatgatgtcattcacaacatccgccttgtatatgatgtttctgttttcaaacaccaagtcgaataccgtctttagtcggaaggttgatgtcgtatccgatgtatgaggcaacattgttgttacaattttgaaaggcggtattataatattcgtctttctgaatgtcgaacctatctagtagataccgtagtatattgagagtgtatccttgattatgttttatgaatagataaagtagatgttgtccttcttccttttgttcgtgccaattgagtaacattatgagaatatgacctgttgcacaatcgttccatgatgggtgtacaatcaagattattacgtatcctcgagataaaagagcatacaccacacgaggactatgtttggtatactgttgaaggtaagtgtgtaacggcgttaatgtttgctccataatctattatcgcgtagatgaatcgcttctcggctcgcatcttagtgtgacttgacttgtaataattgcttttgtagaacgtggatatgtgtttacagtagtaatgaagagaagtgagttcatcctcgtcggcgcaattagggtcggatcctttgtacagaacgtaatagtttaagctcccattgaatttatatctaagataacacagcaatagatcggatgatttactaaagtcatcaatggtgtccgttagtatatcaaagatcttgttatcgattgatagtggtcatccttgctatcaaagttacgcatgccgtggtgtaacaatatctttaatacagatggattaaatcgtgtattcatcgtatagcaatgtaatggagagttacctcgtttattcagatcgcagtgtttaataactagcttaaacagatgagacgatgtatccacatcaaagaacgtaaaatacatatgacaaacattgttgacagaaacgtgaccttcattcttaccgtcgtccataaatacgttaggtatgtaccacatactgtcgcgaacgatgcgtacaatctcgtccatctcataatgatttactttttcataattaaagatgtgaaagaaaaccgaacaatatatttttttagtaatgtttatgcgagacatataaaataaactccgtgtttatgatgccggtaaatgtttttatcatcttggacggaatcgattttgtaatatgtcatggaaacaaatgaaacaggacattatcgctccatgataaattatttaatggagtaataaagtatctccatgggtaatttcgaaatcaagttatcgtctgtattaatgttgtccactatggagtcgatcctctcattgttctttacagtttctgtaatgatggacgttagttcttttttgtaccatttgatgtcggattctttgcgtatctcaatctgtggcgtttgcttcgtttaaataatatatcaaacatggagacgcctgatatgtaggcattcttcattctattaatgtctactctatagcgctttagttccttatgacgaccggcgatatcatactttactttagaaggaaaatcatcatctatgattaaggcgtatctgatacaggcgaataatggttcaggatatagatagcgtatatctctattaaatgcgtcaatcatagtctctagagtgggatggtagctaagtaataaatcaactagcttcgttttgttttctcttctgtaactacttttctggatggccgtattgattatcgagcgtgatgttgtaacactcgctccatattccaataaccgctttgcaaattgtatattattgacatcgaccgcgtaatatagtagagttttattctcattatcgatcatatctatattatccatgtacttgcttagtatatcaaatacatctattagtatggtttcataacagtgatacccgcaattattaaatctcgataatatcagaccgtacatacatagacggccattgttagatatgtgatttacagccgcgtgtccatattttccacgataaaccttacgacgtttacatcgacgagattattattaacaaagtagtcgtgcagaggatagttgttgtccgttatctaacatgcatcgaacgaccatatcgccgtaatgtaagtagtttatcaacatggcttgtacgatggattcatcctgttgtctaaatctctttagaatgttatcgatgatgtagtggttatattctctggaatcgtacgaagtaatactacgcattacgtcgacaagagtatgacgtctctcaataagaagattaacgatttccatgtctacattatatggggttactctaaatcgcttgtttagataatacgcctctaatatagggctgacgtcgtatactctacacgtgtccacatcctttattaataataatttaacaatctctatatctatggttgagaaagaccagtagtattggatgggtaaagatcctccttcgtctctgccatggatggaaacattgttattgatcaaacatttaattacatccttggatagagattgagattctctatgagacgatatatagtaatgaagagagttcttacacatatcactgttgtacatacaggtacgaaatacgtaaccggtgctgtaacattctgatttaagaagccatagcaatacttctggtctcggattaggcgtcgttacgtatatatccaccaatccgagaccattgattgcataattcgtattcttggacggacgtatccgtttatccacaattaggtattttagcagacgtaagtcgatattatccgaatacagatcgaaatcatttatattcgacttgagttcgttagaggaattcgaatagctggatatcagtagatgcacaatttgagatttgacgtatctatgcttactgtatactcctagcggagttaatccttcgttgtttctacaaagtctctcgactccgcgagagagtaacagtcgaacaatcttaatgtctgtatcgcatttattgaagacgtaacaatgtagcgcattgtttcctcgtctatctatatgttttgataagttgtgacacgtttcaatttctagttttatttttttgtacgtcacatcttcatccagtagacgacatagaatacatgtgcaatccatagctattctggtgctaattattcctatttcacgaaaaatgatgaaggcaatcattcctcataagatgataaaaagtgtagtgagagagcatgaaggagatttagtatttagcagtgcggatatgatccaagagggtgagatagtcgttctcgttcagaatctttcgcagcataagtagtatgtcgatatacttatcgttgaagactcttccagagacgatagctgattgagtacaaagtccaatgattgcacgaagttcttcggcggttttcatggagtcatttctgatgaaacatttaatgatctccacgcaattgtcgatattgtcccacggaagtgaatccttcaactcaccaccaaagagctccgttgcatcagttctgaaagagatgagaagcctgtagagaggccctgcagtttctctatgggtccatctatgagaaacccacaggatgtattcagtcagacaatgtctgacgtcggccacggtattcagggagtccttagtagcgtggcaatgacagggtctgaactgggcacaaggaaaggccattgtaaaggtagacctgtagccgtttatgctaatagagggctttaatttccatttttttaatgggttgtggatgaggaatgagagtgatatcatattgagatacgtagttatgtagaggtgtatttcctatattatttactttcggtttcatattttaccaactctttaataaatttcttttcacgatgcatcttattaaatgacgttttctcataagtggacatatagatgcagaagtaatgaagaaaagtattacctctatcatctgcataattagggtctgctccttttcttaacaacttatacagtacgtagtagtttatcggttttaaatcaagtctagaatatatagtggattaatatatttttatattagctaaagctatctatactatcagaaagcatatcattctcaacttcatcatgagttaaatatttgtgtaatggaatgtgaccatcactgtcatgacatactcctttaataggttttttaaaacagatgattcaaatccttcattcattagataacagtgtaacggagtcgtaccttctactagtttgtttatatcacagcattctacaaacagtctaaacaatagagaagacggacagactttaacgtataaatgacacatgttatcgatattcgttgatgaattattattaaacgtagttatgataaatgattctaacgacatctctcgctagagataaaatctagtatcgtatcattaaacatctttgcatcatactcgcatagcatagtttttcataattaatacaatatttaaaagacttattcggaaagtattttaatacatgtatcatcgatggagatccatatgaggagtcacttgtagttcttcagtagtaataacagtgctatcatcgatagtataattatatgtagaaggttcatatgttgttgtaattggagtaactgttggtagttcttccgtggaatcaataattatactaacagcaatagtataattatataaatatgttccgttgatatcacatattttaatgaactcatttctaacaccctcagctatatctgtccaattaaatgtagccaacaatctactacgttctctttgattgactacttgtacggtagcgacgctacactatctttattgtcttctacatgctccaattgaatgtcatgatacaacgcagtttttcttatgcatgtttcataacaccacgaacatgtcgcagtaagatatatagccagagataatttctgtaaattcatgattgccggtcataaacaagcccgtcaataattgtggctatatattcagtttatagagcaaaataattaagcacaatagcgcttaatctcaaaatatgttatgtttatttttttcatattaaacatactggttaaaatcctctaaaggctgatcttcatctataaatcaagatcataattacatttagacagtggtttcatgtttataaaaatgttctttttgtgtgaataaggaatatactaatcaataatcaaccatcgaccccattacgatagtatgcaggcaaccccccattagagaggtacgtgtaatcagtctctccagttttagtatttttataagtcattgttacataaacggcttttaaacagtctcctcgataataagccatatctggaaatttattaaatactcgagtcattttacgcacggtcaaaaaagtaagtaatgtcgacgacttcttacattctatagaaacacctagaatactcattttcttttggaaaatatcctcagactctgatttgaacaatgcacgacctatagtaaaccgtgaccaataagttatattagtcaatggtatatccaaaccatcaggtgtggatagtacgccgatagtccagtctttggtatcgatagtgtagttattgaactgagaagttaccgtatagtctttttggtcatctctaaacaaggaaactaatacctctacactattgaacgatttatcttccgtaatgggtggaataacgggaatataaagtggactagcgatggatgaagtcacgaatataagacacgctattaatccgtatatcatcattttgatattacttataataacgatttgtttaatttttagtttatactattaattgtaaatgatattattatttttttaagtattatcagctttagtttatactatttgtaatatttagacatagataaacgtgataaaagtctatttgtttatatttattgcggatagcagtatttccctataaaaagtatacgtcctgtgttgtctttaatcatgtacatgaatggatggtttatgtagaccttcgtacgatataccatcgaaaagttagtcataaatactcctgtaacggccgatgcttctgtatactcctcattaacatctataaacgtcgtatgtagaaatttttctacagtgatagtttcattacacatcttgctaaaatctgcataatatccgaatatattagtaagtcctaaattttctagaataggtaccagattatacggttctgtcatttccactttaaactttggcatatacaagtctatacttttagtagataacataccacaccattttttaaatttttcatctgttatatttttttctatgttatatataccttctatgtcgtccggtagtataatcaccatactagagtttccctcgtatggaatatcgataatagagaatcctccgaataattcattaatatgtacatattgcaagttattctcggtacccaccatcatatcaacgctggtaactatattcttagaaatataaaacttgtctgtatatgtaagatgtttagaaaatggatatttccacattgctttaaaatggacggcgctaacaactgtcatacgagtattaatggatagcggactagtcaataaggaattaattttaccatttgtcattgtcttaacccattcgttgattagttcctttgtttggttagcattattaaagtttacagtttgaaaatcgtcttttattttttgtaggaaggaggcatggaactcgatactatcgctaccgtatattttatttgcggtagctagtgtcgcacaatacggaatatctacgtccatgtcattattgtcatccttcttatcatcgggtgtattctcattcatattctctatatattttgatagttgttcagctgtagaaccagctgctccatgatttagaatagataaagtagataaaatggaaactggagaaatcaaaacattttcatcagggtgttttacgattagttctttaaagatatccatggtatagaccaaacaataacgataacgatatatatcataaataaataatgttaaatttcagtttatgtttgtaccccgtattcatacttaacaaattggtattacataccattaataatgcaagcataaaaaatcgttagtagatgtttctaaatataggttccgtaagcaaagaatataagaatgaagggtaatgataaaatcaatcgttatctaaaatgatcatactcatttattttattctattatattaacacatacatttttaacagcaacacattcaatattgtattgttatttttatattatttacacaattaacaatatattattagtttatattactgaattaataatataaaattcccaatcttgtcataaacacacactgagaaacagcataaacacagaatccatcaaaaatgtcgatgaaatatctgatgttgttgttcgctgctatgataatcagatcattcgccgatagtggtaacgctatcgaaacgacattgccagaaattacaaacgctacaacagatattccagctatcagattatgcggtccagagggagatggatattgtttacacggtgactgtatccacgctagagatatcgacggtatgtattgtagatgctctcatggttatacaggcattagatgtcagcatgtagtattagtagactatcaacgttcagaaaaaccaaacactacaacgtcatatatcccatctcccggtattatgcttgtattagtaggcattattattatgtgttgtctattatctgtttataggttcactcgacgaactaaactacctctacaagatatggttgtgccataatttttataaattttttttatgagtatttttacaaaaatgtataaagtgtatgtcttatgtatatttataaaaatgctaaatatgcgatgtatctatgttatttgtatttatctaaacaatacctctacctctagatattatacaaaaattttttatttcagcatattaaagtaaaatctagttaccttgaaaatgaatacagtgggtggttccgtatcaccagtaagaacataatagtcgaatacagtatccgattgagattttgcatacaatactagtctagaaagaaatttgtaatcatcttctgtgacgggagtccatatatctgtatcatcgtctagtttatcagtgtcccatgctatatttctgttatcatcattagttaatgaaaataactctcgtgcttcagaaaagtcaaatattgtatccatacatacatctccaaaactatcgcttatacgtttatctttaacgatacctatacctagatggttatttactaacagacattttccagatctattgactataactcctatagtttccacatcaaccaagtaatgatcatctattgttatataacaataacataactcttttccatttttatcagtatgtatatctatatcaacgtcgtcgttgtagtgaatagtagttattgatctattatatgaaacggatatgtctagaacggcaattgtcttacgtccagttaacactttctttgatttaaagtctagagtctttgcaaacataatatccttatccgactttatatttcctgtagggtggtataattttattttgcctccacatatcggtgtttccaaatatattactagacaatattccatatagttattagttaagggtacccaattagaacacgtacgcttattatcatcatttggatcgtatttcataaaagttattgtgttatcgatgtcaacacattctacattttttaatcgtctatatagtatttttctgatattttctataatatcagaattgtcttccatcggaagttgtatactatcggaatcagttacatgtttaaataattctctgatgtcattccttatacaatcaaattcattattaaacagtttaatagtctgtagacctttatcgtcgtaaatatccattgtcttattagttacgcttatttttatgtgtttttacgttgatttattatattttataagaatgattgtttgacgaatcacgagaactattaagacacattattaggtatatattataaaaaagtttttgattacgatgttataagaggaaagaggacacattaacatcatacatcaattaactacattcttataacatcgtaatcaaaagaattgcaattttgatgtataacaactgtcaatgggttatggaattgtatattacatattatacggtatgttggtaacgacaaataccgatcggtaattgtctgccggtgtaatagaattatatatatctatctattacaccggccttgtatacataataataagttgtggtagtatgatctccatatttataatttaggactttgtattcagtatttttggaatcataaaaaataaaaaaaagttttactaatttaaaatttaaaaagtatttacatttttttcactgtttagtcgcggatatggaattcgatcctgccaaaatcaatacatcatctatagatcatgtaacaatattacaatacatagatgaaccaaatgatataagactaacagtatgcattatccgaaatattatatcaatatcacaaaaataaatccacatttggctaatcaatttcgggcttggaaaaaacgtatcgccggaagggactatatgactaacttatctagagatacaggaatacaacaatcaaaacttactgaaactatacgtaactgtcaaaaaaatagaaacatatatggtctatatatacactacaatttagttattaattggataaccgatgtgattatcaatcaatattaagaaggttggtaaattggtacatagctaataatacctatacacccaataatacaacaaccatttctgagttggatatcatcaaaatactggataaatacgaggacgtgtatagagtaagtaaagaaaaagaatgtggaatttgctatgaagttgtttactcaaaacgatagatactttggtttattggattcgtgtaatcatatattttgcataacatgtatcaatatatggcataaaacacgaagagaaaccggtgcgtcggataattgtcctatatgtcgtacccgttttagaaacataacaatgagcaagttctataagctagttaactaataaataaaaagtttaatttgttgacgacgtatgtcgttatttttctcgtatgaaagattaaattcaattcaattcgttgtttctaatataatctgccgtattggatggattctcaagacaattgcatttagattatatcataaataaaaatagtagcacacaactacttcagcaaacattctttttataaatgccatctatcgtagtgaggacacaagtgaacctataatgagcaaatttattagtatcggttacatgaaggactttctgtagagtgacgattctaccatctatggtacgaacggtttcatcttctttgatgccatcacccagatgttctataaacttggtatcctcgtccgatctcatatcctttgccaaccaatacatgtagctaaaattaggcataaatttcacacatccagtgcaacgaaattctccagaagatgttacgatgtttaggttaggacatttgatttcgtcggcattaacatatgggtgaacacacccatacatgaaggcgatgagaaataggattctcatcttgccaaaatatcactagaaaaaatttatttatcaattttaaaggtataaaaaatacttattgttgctcgaatattttgtatttgatggtatacggaagattagaaatgtaggtattatcatcaactgattctatggttttatgtattctatcatgtttcactattgcgttggaaataatatcatatgcttccacatatattttattttgttttaactcataatactcacgtaattctggattattggcatatctatgaataattttagctccatgatcagtaaatattaatgagaacatagtattaccacctaccattatttttttcatctcattcaattcttaattgcaaagatctatataatcattatagcgttgacttatggactctggaatcttagacgatgtacagtcatctataatcatggcatatttaatacattgttttatagcatagtagttatctacgatgttagatatttctctcaatgaatcaatcacataatctaatgtaggtttatgacataatagcattttcagcagttcaatgtttttagattcgttgatggcaatggctatacatgtatatccgttatttgatctaatgttgacatctgaaccggattctagcagtaaagatactagagattgtttattatatctaacagccttgtgaagaagtgtttctcctcgtttgtcaatcatgttaatgtctttaagataaggtaggcaaatgtttatagtactaagaattgggcaagcataagacatgtcacaaagaccctttttgtatgtataagtgtaaaaattataacattcatagttggatttacataggtgtccaatcgggatctctccatcatcgagataattgatggcatctcccttccttttttagtagatatttcatcgtgtaagaatcaatattaatatttctaaagtatccgtgtatagcctctttatttaccacagttccatattccactagagggatatcgccgaatgtcatatactcaattagtatatgttggaggacatccgagttcattgttttcaatatcaaaaagatggtttccttatcatttctccatagtggtacaatactacacattattccgtgaggctttccattctccaaaaacaatttgaccaaatctacatctttattgtatctataatcactatttagataatcagccataattcctcgagtgcaacatgttagatcgtctatatatgaataagcagtgttatctattcctttcattaacaatttaacgatgtctatatctatatgagatgacttaatataatattgaagacctgtacaatagtttttatctataaaagacggcttgattccgtgattaattagacatttaacaacttccggacgcacatatgctctcgtatccgactttgaatacagatgcaatacggtaccgcaatttcgtagttgataatcatcatacgcgtatcagtactcgtcctcataaagaacactgcagccattttctatgaacaaatcaataattttaggaacaggatcattgtcattacataattttctataactgaacgatggttttcacatttaacactcaagtcaaatccatgttctaccaacacctttatcaagtcaacgtctacatttttggatttcatatagctgaatatattaaagtcatttatgttgctaaatccagtggcttctagtagagccatcgctatatcctttaactttaacatgtctactatttgtgtattcttctaatggggtagctgtctccaatttttgcgtaatggattagtgccactgtctagtagtagtttgacgacctcgacattattacaatgctcattaaaaaggtatgcgtgtaaagcattattcttgaattggttcctggtatcattaggatctctgtctctcaacatctgtttaagttcatcgagagccacctcctcattttccaaatagtcaaacattttgactgaatgagctactgtgaactctatacacccacacaactaatgtcattaaatatcatgtcaaaaacttgtacaattattaataaaaataatttagtgtttaaattttaccagttccagattttacacctccgttaaccccactggacgatcctcctccccacattccaccgccaccagatgtataagttttagatcctttattactaccatcatgtccatggataaagacactccacatgccgccactaccccctttagaagacatattaataagacttaaggacaagtttaacaataaaattaatcacgagtaccctactaccaacctacactattatatgattatagtttctatttttacagtaccttaactaaagtctctagtcacaagagcaatactaccaacctacactattatatgattatagtttctatttttataggaacgcgtacgagaaaatcaaatgtctaatttctaacggtagtgttgataaacgattatcgtcaatggatacctcctctatcatgtcgtctattttcttactttgttctattaacttattagcattatatattatttgattataaaacttatattgcttattagcccaatctgtaaatatcggattattaacatatcgtttctttgtaggtttatttaacatgtacatcactgtaagcatgtccgtaccatttattttaatttgacgcatatccgcaatttctttttcgcagtcggttataaattctatatatgatggatacatgctacatgtgtacttataatcgactaatatgaagtacttgatacatattttcagtaacgatttattattaccacctatgaataagtacctgtgatcgtctaggtaatcaactgttttcttaatacattcgatggttggtaatttactcagaataatttccaatatcttaatatataattctgctatttctggaatatatttatctgccagtataacacaaatagtaatacatgtaaacccatattttgttattatattaatgtctgtgccattatctattaaccattctactaggctgacactatgcgacttaatacaatgataaagtatactacatccatgtttatctattttgtttatatcattaatatacggcttacaaagttttagtatcgataacacatccaactcacgcatagagaaggtagggaataatggcataatatttattaggttatcatcattgtcattatttacaactaagtttccattttttaaaatatactcgacaactttaggatctctattgccaaatttttgaaaatatttatttatatgcttaaatctatataatgtagctccttcatcaatcatacatttaataacattgatgtatactgtatgataagatacatattctaacaatagatcttgtatagaatctgtatatcttttaagaattgtggatattaggatattattacgtaaactattacacaattctaaaatataaaacgtatcacggtcgaataatagttgatcaactatataattatcgattttgtgatttttcttcctaaactgtttacgtaaatagttagatagaatattcattagttcatgaccactatagttactatcgaataacgcgtcaaatatttcccgtttaatatcgcatttgtcaagataataatagagtgtggtatgttcacgataagtataataacgcatctctttttcgtgtgaaattaaatagtttatcacgtccaaagatgtagcataaccatcttgtgacctagtaataatataataatagagaactgttttacccattctatcatcataatcagtggtgtagtcgtaatcgtaatcgtctaattcatcatcccaattataatattcaccagcacgtctaatctgttctattttgatcttgtatccatactgtatgttgctacatgtaggtattcctttatccaataatagtttaaacacatctacattgggatttgatgttgtagcgtatttttctacaatattaataccatttttgatactatttatttctatacctttcgaaattagtaatttcaataagtctatatcgatgttatcagaacatagatattcgaatatatcaaaatcattgatatttttatagtcgactgacgacaataacaaaatcacaacatcgtttttgatattattatttttcttggtaacgtatgcctttaatggagtttcaccatcatactcatataatggatttgcaccactttctatcaatgattgtgcactgctggcatcgatgttaaatgttttacaactatcatagagtatcttatcgttaaccatgattggttgttgatgctatcgcattttttggtttctttctagggataacagggtaat

SEQ ID NO: 26 - DNA, 24931 bp, Vaccinia virus
tagggataacagggtaattgtttaaattttaccagttccagattttacacctccgttaaccccactggacgatcctcctccccacattccaccgccaccagatgtataagttttagatcctttattactaccatcatgtccatggataaagacactccacatgccgccactaccccctttagaagacatattaataagacttaaggacaagtttaacaataaaattaatcacgagtaccctactaccaacctacactattatatgattatagtttctatttttacagtaccttaactaaagtctctagtcacaagagcaatactaccaacctacactattatatgattatagtttctatttttataggaacgcgtacgagaaaatcaaatgtctaatttctaacggtagtgttgataaacgattatcgtcaatggatacctcctctatcatgtcgtctattttcttactttgttctattaacttattagcattatatattatttgattataaaacttatattgcttattagcccaatctgtaaatatcggattattaacatatcgtttctttgtaggtttatttaacatgtacatcactgtaagcatgtccgtaccatttattttaatttgacgcatatccgcaatttctttttcgcagtcggttataaattctatatatgatggatacatgctacatgtgtacttataatcgactaatatgaagtacttgatacatattttcagtaacgatttattattaccacctatgaataagtacctgtgatcgtctaggtaatcaactgttttcttaatacattcgatggttggtaatttactcagaataatttccaatatcttaatatataattctgctatttctggaatatatttatctgccagtataacacaaatagtaatacatgtaaacccatattttgttattatattaatgtctgtgccattatctattaaccattctactaggctgacactatgcgacttaatacaatgataaagtatactacatccatgtttatctattttgtttatatcattaatatacggcttacaaagttttagtatcgataacacatccaactcacgcatagagaaggtagggaataatggcataatatttattaggttatcatcattgtcattatttacaactaagtttccattttttaaaatatactcgacaactttaggatctctattgccaaatttttgaaaatatttatttatatgcttaaatctatataatgtagctccttcatcaatcatacatttaataacattgatgtatactgtatgataagatacatattctaacaatagatcttgtatagaatctgtatatcttttaagaattgtggatattaggatattattacgtaaactattacacaattctaaaatataaaacgtatcacggtcgaataatagttgatcaactatataattatcgattttgtgatttttcttcctaaactgtttacgtaaatagttagatagaatattcattagttcatgaccactatagttactatcgaataacgcgtcaaatatttcccgtttaatatcgcatttgtcaagataataatagagtgtggtatgttcacgataagtataataacgcatctctttttcgtgtgaaattaaatagtttatcacgtccaaagatgtagcataaccatcttgtgacctagtaataatataataatagagaactgttttacccattctatcatcataatcagtggtgtagtcgtaatcgtaatcgtctaattcatcatcccaattataatattcaccagcacgtctaatctgttctattttgatcttgtatccatactgtatgttgctacatgtaggtattcctttatccaataatagtttaaacacatctacattgggatttgatgttgtagcgtatttttctacaatattaataccatttttgatactatttatttctatacctttcgaaattagtaatttcaataagtctatatcgatgttatcagaacatagatattcgaatatatcaaaatcattgatatttttatagtcgactgacgacaataacaaaatcacaacatcgtttttgatattattatttttcttggtaacgtatgcctttaatggagtttcaccatcatactcatataatggatttgcaccactttctatcaatgattgtgcactgctggcatcgatgttaaatgttttacaactatcatagagtatcttatcgttaaccatgattggttgttgatgctatcgcattttttggtttctttcatttcagttatgtatggatttagcacgtttgggaagcatgagctcatatgatttcagtactgtagtgtcagtactattagtttcaataagatcaatctctagatctatagaatcaaaacacgataggtcagaagataatgaatatctgtaggcttcttgttgtactgtaacttctcgttttgttagatgtttgcatcgtgctttaacatcaatggtacaaattttatcctcgctttgtgtatcatattcgtccctactataaaattgtatattcagattatcatgcgatgtgtatacgctaacggtatcaataaacggagcacaccatttagtcataacagtaatccaaaattttttaaagtatatcttaacgaaagaagttgtgtcattgtctacggtgtatggtactagatcctcataagtgtatatatctagagtaatgtttaatttatcaaatggttgataatatggatcctcatgacaatttccgaagatggaaatgagatatagacacgcaataaatctaattgcggacatggttactccttaaaaaaatacgaataatcaccttggctatttagtaagtgtcatttaacactatactcatattaatccatggactcataatctctatacgggattaacggatgttctatatacggggatgagtagttctcttctttaactttatactttttactaatcatatttagactgatgtatgggtaatagtgtttgaagagctcgttctcatcatcagaataaatcaatatctctgtttttttgttatacagatgtattacagcctcatatattacgtaatagaacgtgtcatctaccttattaactttcaccgcatagttgtttgcaaatacggttaatcctttgacctcgtcgatttccgaccaatctgggcgtataatgaatctaaactttaatttcttgtaatcattcgaaataatttttagtttgcatccgtagttatcccctttatgtaactgtaaatttctcaacgcgatatctccattaataatgatgtcgaattcgtgctgtatacccatactgaatggatgaacgaataccgacggcgttaatagtaatttactttttcatctttacatattgggtactagttttactatcataagtttataaattccacaagctactatggaataagccaaccatcttagtataccacacatgtcttaaagtttattaattaattacatgttgttttatatatatcgctacgaatttaaacagagaaatcagtttaggaaaaaaaattatctatctacatcatcacgtctctgtattctacgatagagtgctactttaagatgcgacagatctgtgtcatcaaaaatatactccattaaaatgattattccggcagcgaacttgatattggatatatcacaacctttgttaatatctacgacaatagacagcagtcccatggttccataaacagtgagtttatctttctttgaagagatattttgtagagatcttataaaactgtcgaatgacatcgcatttatatctttagctaaatcgtatatgttaccatcgtaatatctaaccgcgtctatcttaaacgtttccatcgctttaaagacgtttccgatagatggcctcatttcatcagtcatactgagccaacaaatataatcgtgtataacatctttgatagaatcagactctaaagaaaacgaatcggctttattatacgcattcatgataaacttaatgaaaaatgtttttcgttggatgaatagtatgtcttaataattgttattattttcattaattaatatttagtaacgagtacactctataaaaacgagaatgacataactagttatcaaagtgtctaggacgcgtaattttcatatggtatagatcctgtaagcattgtctgtattctggagctattttctctatcgcattagtgagttcagaatatgttataaatttaaatcgaataacgaacataactttagtaaagtcgtctatattaactcttttattttctagccatcgtaataccatgtttaagatagtatattctctagttactacgatctcatcgttgtctagaatatcacatactgaatctacatccaattttagaaattggtctgtgttacatatctcttctatattattgttgatgtattgtcgtagaaaactattacgtagaccattttctttataaaacgaatatatagtactccaattatctttaccgatatatttgcacacataatccattctctcaatcactacatctttaagattttcgttgttaagatatttggctaaactatataattctattagatcatcaacagaatcagtatatatttttctagatccaaagacgaactctttggcgtcctctataatattcccagaaaagatattttcgtgttttagtttatcgagatctgatctgttcatatacgccatgattgtacggtacgttatgataaccgcataaaataaaaatccattttcatttttaaccaatactattcataattgagattgatgtaatactttgttactttgaacgtaaagacagtacacggatccgtatctccaacaagcacgtagtaatcaaatttggtgttgttaaacttcgcaatattcatcaatttagatagaaacttatactcatcatctgttttaggaatccatgtattattaccactttccattatcccaggctatgtttcgtccatcatcgttgcgcagagtgaataattcttttgtattcggtagttcaaatatataatccatgcatagatcggtaaagctattgtagatgtgatttttcctaaatctaatataaaactcgtttactagcaaacactttcctgatttatcgaccaagacacatatggtttctaaatctatcaagtggtggggatccatagttatgacgcagtaacatatattattacattcttgactgtcgctaatatctaaatatttattgttatcgtattggattctgcatatagatggcttgtatgtcaaagatatagaacacataaccaatttatagtcgcgctttacattctcgaatctaaagttaagagatttagaaaacattatatcctcggatgatgttatcactgtttctggagtaggatatattaaagtctttacagatttcgtccgattcaaataaattactaaataatatcccacattatcatctgttagagtagtatcattaaatctattatattttatgaaaaatatatcacttgctcacctctatatttcgtacatttttaaactgtttgtataatatctctctgatatatttattgtgtcggtagacgataccgttacatttgaattaatggtgttccattttacaacttttaacaagttgaccaattcatttctaatagtatcaaactctccatgattaaatattttaatagtatccattttatatcactacggacacaaagtagctgacataaaccattgtataatttttatgttttatgtttattagcgtacacattttggaagttccggctgccatgtatttcctggagagcaagtagatgatgaggaaccagatagtttatatccgtacttgcacttaaagtctacattgtcgttgtatgagtatgatcttttaaacccgctagacaagtatccgtttgatattgtaggatgtggacatttaacaatctgacacgtgggtggatcggaccattctcctcctgaacacaggacaccagagttaccaatcaacgaatatccactattgcaactataagttacaacgctcccatcggtataaaaatcctcgtatccgttatgtcttccgttggatatagatggaggggattggcatttaacagattcacaaataggtgcctcgggattccataccatagatccagtagatcctaattcacaatacgatttagattcaccgatcaaatgatatccgctattacaagagtacgttatactagagccaaagtctactccaccaatatcaagttggccattatcgatatctcgaggcgatgggcatctccgtttaatacattgattaaagagtgtccatccagtacctgtacatttagcatatataggtcccattttttgctttctgtatccaggtagacatagatattctatagtgtctcctatgttgtaattagcattagcatcagtctccacactattcttaaatttcatattaatgggtcgtgacggaatagtacagcatgatagaacgcatcctattcccaacaatgtcaggaacgtcacgctctccaccttcatatttatttatccgtaaaaatgttatcctggacatcgtacaaataataaaaaagcccatatatgtttgctattgtagaaattgtttttcacagttgctcaaaaacgatggcagtgacttatgagtttcatctttagtaaacatatcataatattcgatattacgagttgacatatcgaacaaattccaagtatttgattttggataatattcgtattttgcatctgctataattaagatataatcaccgcaagaacacacgaacatctttcctacatggttaaagtacatgtacaattctatccatttgtcttccttaactatatatttgtatagataattacgagtctcgtgagtaattccagtaattacatagatgtcgccgtcgtactctacagcataaactatactatgatgtctaggcatgggagacttttttatccaacgatttttagtgaaacattccacatcgtttaatactacatatttttcatacgtggtataaactccacccattacatatatatcatcgtttacgaataccgacgcgcctgaatatctaggagtaattaagtttggaagtcttatccatttcgaagtgccgtgtttcaaatattctgccacacccgttgaaatagaaaattctaatcctcctattacatataactttccatcgttaacacaagtactaacttctgattttaacgacgacatattagtaaccgttttccattttttcgttttaagatctacccgcgatacggaataaacatgtctattgttaatcatgccgccaataatgtatagacaattatgtaaaacatttgcattatagaattgtctatctgtattaccgactatcgtccaatattctgttctaggagagtaatgggttattgtggatatataatcagagtttttaatgactactatattatgttttataccatttcgtgtcactggctttgtagatttggatatagttaatcccaacaatgatatagcattgcgcatagtattagtcataaacttgggatgtaaaatgttgatgatatctacatcgtttggatttttatgtatccactttaataatatcatagctgtaacatcctcatgatttacgttaacgtcttcgtgggataagatagttgtcagttcatcctttgataattttccaaattctggatcggatgtcaccgcagtaatattgttgattatttctgacatcgacgcattatatagttttttaattccatatcttttagaaaagttaaacatccttatacaatttgtggaattaatattatgaatcatagtttttacacatagatctactacaggcgtaacatcaattattacggcagcaactagtatcatttctacattgtttatggtgatgtttatcttcttccagcgcatatagtctaatagcgattcaaacgcgtgatagtttataccattcaatataatcacttcatcatttatatggtgctcctgaatgcgtttaaaaaaattatacggagacgccgtaataatttccttattcacttgtataatttccccattgatagaaaatatcacgctttccattcttgaagtactataagtaattatagtataatgtaaaggtttatatattcaatattttttataaaaaaatcatttcgacattaattcctttttaaatttccgtctatcatctatagaaacgtattctatgaatttataaaatgcttttacgtgtcctatcgtaggcgatagaaccgctaaaaagcctatcgaatttctacaaaagaatctgttatatggtatagggagagtataaaacattaaatgcccgtacttattaaagtattcagtagccaatcctaactctttcgaatacttattaatggctcttgttctgtacgaatctatttttttgaacaacggacctagtggtatatcttgttctatgtatctaaaataatgtctgactagatccgttagtttaatatcctcagtcatcttgtctagaatggcaaatctaactgcgggtttaggctttagtttagtttttatatctacatctatgtctttatctaacaccaaaaatataatagctaatattttattacaatcatccggatattcttctacgatctcactaactaatgtttctttggttatactagtatagtcacgatcagacaaataaagaaaatcagatgatcgatgaataatacatttaaattcatcatctgtaagatttttgagatgtctcattaaaatattattagggttagtactcattatcattcggcagctattacttattttattatttttcaccatatagatcaatcattagatcatcaaaatatgtttcaatcatcctaaagagtatggtgaatgactcttcccatctaatttctgaacgttcaccaatgtctctagccactttggcactaatagcgatcattcgcttagcgtcttctatattattaactggttgattcaatctatctagcaatggaccgtcggacagcgtcattctcatgttcttaatcaatgtacatacatcgccgtcatctaccaattcatccaacaacataagctttttaaaatcatcattataataggtttgatcgttgtcatttctccaaagaatatatctaataagtagagtcctcatgattagttaacaactattttttatgttaaatcaattagtacaccgctatgtttaatacttattcatattttagtttttaggattgagaatcaatacaaaaattaatgcatcattaattttagaaatacttagtttccacgtagttaatgaaacatttgaactcatcgtacaggacgttctcgtacaggacgtaactataaaccggtttatatttgttcaagatagatacaaatccgataacttttttgacgaattctacgggatccactttaaaagtgtcataccgggttctttttatttttttaaacagatcaatggtgtgatgttgattaggtcttttacgaatttgatatagaatagcgttcacatatcctccataatggtcaatcgccatttgttcgtatgtcataaattctttaattatatgacactgtgtattgtttagttcatccttgttcattgttaggaatctatccaaaatggcaattatactagaactataggtgcgttgtatacacatattgatgtgtctgtttatacaatcaatgatatttggatccatgctactaccttcgggtaaaattgtagcatcatataccatttctagtactttaggttcattattatccattgcagaggacgtcatgatcgaatcataaaaaaatatattatttttatgttattttgttaaaaataatcatcgaatacttcgtaagatactccttcatgaacataatcagttacaaaacgtttatatgaagtaaagtatctacgatttttacaaaagtccggatgcataagtacaaagtacgcgataaacggaataataatagatttatctagtctatctttttctatagctttcatagttagatacatggtttcagaagtaggattatgtaacatcagcttcgataaaatgactgggttatttagtcttacacattcgctcatacatgtatgaccgttaactacagagtctacactaaaatgattgaacaatagatagtctaccattgttttgtattcagatagtacagcgtagtacatagcatcttcacaaattatatcattgtctaatagatatttgacgcatcttatggatcccacttcaacagccatcttaaaatcatattgctttcctttatcattaataatttctagaacatcatctctatcataaaagatacaaatattaactgtttgatccgtaataacattgctagtcgatagcaatttgttaataagatgcgctaggctcaatgtcttaataagaagtgtaagaggactatctccgaatttgttttgtttattaacatccgttgatggaagtaaaagatctataatgtctacatacttaactgttttagagcatacaatatggagaggtgtatttccatcatgatctggttttgagggactaattcctagtttcatcatccatgagattgtagaagcttttggattgtctgacataagatgtctatgaatatgatttttgccaaatttatccactatcctggcttcgaatccgatggacattatttttttaaacactctttctgaaggatctgtacacgccaacaacggaccacatccttcttcatcaaccgagttgttaatcttggctccatactgtaccaataaatttattctctctatgacttcatcatctgttcccgagagataatatagaggtgttttattatgtttatcacacgcgtttggatctgcgccgtgcgtcagcagcatcgcgactattctattattattaattttagaagctatatgcaatggataatttccatcatcatccgtctcatttggagagtatcctctatgaagaagttcttcgacaaatcgttcatctagtcctttaattccacaatacgcatgtagaatgtgataattatttccagaaggttcgatagcttgtagcatattcctaaatacatctaaatttttactattatatttggcataaagagatagataatactcggccgacataatgttgtccattgtagtataaaaattaatatttctatttctatttctgtatatttgcaacaatttactctctataacaaatatcataacttagttcttttatgtcaagaaggcactggtttagttcatctataaatgtcacgccataactaccacgcatgccatactcagaattatgataaagatatttatccttggggtgtaggtaatggggattaatctttgttggatcagtctctaagttaacacatgtcacacatgatccatttatagttatatcacacgatgatgatttatgaattgattccggaagatcgctatcgtattttgtggttccacaattcatttccatacatgttattgtcacactaatattgtgatgaactttatctagccgctgagtggtaaacaacagaacagatagtttattatctttaccaacaccctcagccgctgccacaaatctctgatccgtatccatgatggtcatgtttatttctagtccgtatccagtcaacactatgttagcatttctgtcgatatagctttcactcatatgacactcaccaataatagtagaattaatgtcataatttacaccaatagtgagttcggcggcaaagtaccaataccggtaatcttgtcgaggaggacatatagtattcttgtattctaccgaatacccgagagatgcgatacaaaagagcaagactaatttgtaaaccatcttactcaaaatatgtaacaatagtacgatgcaatgagtaagacaataggaaatctatcttatatacacataattattctatcaattttaccaattagttagtgtaatgttaacaaaaatgtgggagaatctaattagtttttctttacacaattgacgtacatgagtctgagttccttgtttttgctaattatttcatccaatttattattcttgactatatcgagatcttttgtataggagtcagacttgtattcaacatgcttttctataatcattttagctatttcggcatcatccaatagtacattttccagattagcagaatagatattaatgtcgtatttgaacagagcctgtaacatctcaatgtctttattatctatagccaatttaatgtccggaatgaagagaagggaattattggtgtttgtcgacgtcatatagtcgagcaagagaatcatcatatccacgtgtccattttttatagtgatgtgaatacaactaaggagaatagccagatcaaaagtagatggtatctctgaaagaaagtaggaaacaatacttacatcattaagcatgacggcatgataaaatgaagttttccatccagttttcccatagaacatcagtctccaatttttcttaacaaacagttttaccgtttgcatgttaccactatcaaccgcataatacaatgcggtgtttcccttgtcatcaaattgtgaatcatccagtccactgaatagcaaaatctttactattttggtatcttccaatgtggctgcctgatgtaatggaaattcattctctagaagatttttcaatgctccagcgttcaacaacgtacatactagacgcacgttattatcagctattgcataatacaaggcactatgtccatggacatccgccttaaatgtatctttactagagagaaagcttttcagctgcttagacttccaagtattaattcgtgacagatccatgtctgaaacgagacgctaattagtgtatattttttcattttttataattttgtcatattgcaccagaattaataatatctctaatagatctgattagtagatacatggctatcgcaaaacaacatatacacatttaataaaaataatatttattaagaaaattcagatttcacgtacccatcaatataaataaaataatgattccttacaccgtacccatattaaggagattccaccttacccataaacaatataaatccagtaatatcatgtctgatgatgaacacaaatggtgtattaaattccagtttttcaggagatgatctcgccgtagctaccatgatagtagatgcctctgctacagttccttgttcgtcgacatctatctttgcattctgaaacattttataaatatataatgggtccctagtcatatgtttaaacgacgcattatctggattaaacatactaggagccatcatttcggctatcgacttaatatccctcttattttcgatagaaaatctagggagtttaagattgtacactttattccctaattgaaacgaccaatagtctaattttgcagccgtaatagaatctgtgaaatgggtcatattatcacctattgccaggtacatactaatattagcatccttatacggaaggcgcaccatatcatattcttcgtcatcgattgtgattgtatttccttgcaatttagtaactacgttcatcatgggaaccgttttcgtaccgtacttattagtaaaactagcattgcgtgttttagtgatatcaaacggatattgccatatacctttaaaatatatagtattaatgattgcccatagagtattattgtcgagcatattagaatctactacattagacataccggatctacgttctactatagaattaattttattaaccgcatctcgtctaaagtttaatctatataggccgaatctatgatattgttgataatacgacggtttaatacacacagtattatctacgaaactttgataagttagatcagtgtacgtatatttagatgttttcagcttagctaatcctgatattaattctgtaaatgctggacccagatctctttttctcaaatccatagtcttcaataattctattctagtattacctgatgcaggcaatagcgacataaacatagaaaacgaataaccaaacggtgagaagacaatattatcatcttgaatatttttatacgctactataccggcattggtaaatccttgcagacgataggtagacactgaacacgttaacgatagtatcaataacgcaatcatgattttatggtattaataattaaccttatttttatgttcggtataaaaattattgatgtctacacatccttttgtaattgacatctatatatccttttgtataatcaactctaatcactttaacttttacagttttccctaccagtttatccctatattcaacatatctatccatatgcatcttaacactctccgccaagatagcttcaaagtgaggatagtcaaaaagataaatatatagagcataatcattctcgtatactctgccctttattacatcacccgcattgggcaacgaataacaaaatgcaagcatcttgttaacgggctcgtaaattgggataaaaattatgtttttatatctattttattcaagagaatattcaggaatttctttttccggttgtatctcatcgcagtatatatcatttgtacattgtttcatattttttaatagtttacaccttttagtaggactagtatcgtacaattcatagctgtattttgaattccaatcacgcataaaaatatcttccaattgttgacgaagacctaatccatcatccggtgtaatattaatagatgctccacatgtatccgtaaagtaatttcctgtccaatttgaggtacctatataggccgttttatcggttaccatatatttggcatggtttaccctagaatacggaatgggaggatcagcatctggtacaataaatagctttacttctatatctatgtttttagattttagcatagcgatagatcttaaaaagtttctcatgataaacgaagatcgttgccagcaactaatcaatagcttaacggatacttgtctgtctatagcggatcttcttaattcatcttctatataaggccaaaacaaaattttacccgccttcgaataaataatagggataaagttcataacagatacataaacgaatttactcgcatttctaatacatgacaataaagcggttaaatcattggttctttccatagtacatagttgttgcggtgcagaagcaataaatacagagtgtggaacaccacttacgttaatactaagaggatgatctgtattataatacgacggataaaagtttttccaattatatggtagattgttaactccaagataccagtatacctcaaaaatttgagtgagatccgctgccaagttcctattattgaagatcgcaatacccaattctttgacctgagttagtgatctccaatccatgttagcgcttcctaaataaatatgtgtattatcagatatccaaaattttgtatgaagaactcctcctaggatatttgtaatatctatgtatcgtacttcaactccggccatttgtagtctttcaacatcctttaatggtttgttagatttattgacggctactctaactcttactcctcttttgggtaattgtacaatctcgtttaatattatcgtgccgaaattcgtacccacttcatccgataaactccaataaaaagatgatatatctagtgtttttgtggtattggatagaatttccctccacatgttaaatgtagacaaatatactttatcaaattgcatacctataggaatagtctctgtaatcactgcgattgtattatccggattcattttatttgttaaaaaataatcctatatcacttcactctattaaaaatccaagtttctatttctttcatgactgattttttaacttcatccgtttccttatgaagatgatgtttggcaccttcataaatttttatttctctattacaatttgcatgttgcatgaaataatatgcacctgaaacatcactaatctcattgtttgttccctggagtatgagagtcggggggtgttaatcttggaaattatttttctaaccttgttggtagccttcaagacctgactagcaaatccagccttaattttttcatgattgattaatgggtcgtattggtatttataaactttatccatatctctagatactgattctggacatagctttccgactggcgcatttggtgtgatggttcccataagtttggcagctagcagattcagttttgaaacagcatctgcattaactagaggagacattagaatcattgctgtaaacaagtttggattatcgtaagaggctagtatagaaattgttgctcccatggaatgacccaataagtagatttaatagttaccacgtgctgtaccaaagtcatcaatcatcattttttcaccattacttcttccatgtccaatatgatcatgtgagaatactaaaattcctaacgatgatatgttttcagctagttcgtcataacgtccagaatgtttaccagctccatgacttatgaatactaatgccttaggatatgtaataggtttccaatatatgtaatcattgtccagattgaacatacagtttgcactcatgattcacgttatataactatcaatattaacagttcgtttgatgatcatattatttttatgttttattgataattgtaaaaacatacaattaaatcaatatagaggaaggagacggctactgtcttttgtgagatagtcatggcgactaaattagattatgaggatgctgttttttactttgtggatgatgataaaatatgtagtcgcgactccatcatcgatctaatagatgaatatattacgtggagaaatcatgttatagtgtttaacaaagatattaccagttgtggaagactgtacaaggaattgatgaagttcgatgatgtcgctatacggtactatggtattgataaaattaatgagattgtcgaagctatgagcgaaggtgaccactacatcaattttacaaaagtccatgatcaggaaagtctattcgctaccataggaatatgtgctaaaatcactgaacattggggatacaaaaagatttcagaatctagattccaatcattgggaaacattacagatctgatgaccgacgataatataaacatcttgatactttttctagaaaaaaaattgaattgatgatataggggtcttcataacgcataattattacgttagcattctatatccgtgttaaaaaaaattatcctatcatgtatttgagagttttatatgtagcaaacatgatagctgtgatgccaataagctttagatattcacgcgtgctagtgttagggatggtattatctggtggtgaaatgtccgttatataatctacaaaacaatcatcgcatatagtatgcgatagtagagtaaacatttttatagtttttactggattcatacatcgtctacccaatttggttataaatgaaattgtcgccaatcttacacccaaccccttgttatccattagtatagtattaacttcgttatttatgtcataaactgtaaatgattttgtagatgccatatcatacatgatattcatgtccctattataatcattactaactttatcacaatatatgttgataatatctatatatgatctagtctttgtgggcaactgtctatacaagtcgtctaaacgttgtttactcatatagtatcgaacagccatcattacatggtcccgttccgttgatagataatcgagtatgttagtggacttgtcaaatctatataccatattttctggaagtggatatacatagtcgtgatcaacattattgctagcctcatcttctatatcatgtactataccattatctatatcatctacataatctacgatattattacacataaacatcgacaacatactattgtttattatctaagtcctgttgatccaaacccttgatctcctctatttgtactatctagagattgtacttcttccagttctggataatatatacgttgatagattagctgagctattctatctccagtatttacattaaacgtacattttccattattaataagaatgactcctatgtttcccctataatcttcgtctattacaccacctcctatatcaatgccttttagtgacagaccagacctaggagctattctaccatagcaaatcttaggcatggacatactaatatctgtcttaattaactgtctttctcctggagggatagtataatcgtaagcgctatacaaatcatatccggcagcacccggcgattgcctagtaggagatttagctctgttagtttccttaacaaatctaactggtgagttaatattcatgttgaacataaaactaatattttatttcaaaattatttaccatcccatatattccatgaataagtgtgatgattgtacacttctatagtatctatatacgattcacgataaaatcctcctatcaatagcagtttattatccactatgatcaattctggattatccctcggataaataggatcatctatcagagtccatgtattgctggattcacaataaaattccgcatttctaccaaccaagaataaccttctaccgaacactaacgcgcatgatttataatgaggataataagtggatggtccaaactgccactgatcatgattgggtagcaaatattctgtagttgtatcagtttcagaatgtcctcccattacgtatataacattgtttatggatgccactgctggattacatctaggtttcagaagactcggcatattaacccaagcagcatccccgtggaaccaacgctcaacagatgtgggatttggtagacctcctactacgtataatttattgttagcgggtatcccgctagcatacagtctggggctattcatcggaggaattggaatccaattgtttgatatataatttacagctatagcattgttatgtatttcattgttcatccatccaccgatgagatatactacttctccaacatgagtacttgtacacatatggaatatatctataatttgatccatgttcataggatactctatgaatggatacttgtatgatttgcgtggttgtttatcacaatgaaatattttggtacagtctagtatccattttacattatttatacctctgggagaaagataatttgacctgattacatttttgataaggagtagcagatttcctaatctatttcttcgctttatataccacttaatgacaaaatcaactacataatcctcatctggaacatttagttcatcgctttctagaataagtttcatagatagataatcaaaattgtctatgatgtcatcttccagttccaaaaagtgtttggcaataaagtttttagtatgacataagagattggatagtccgtattctatacccatcatgtaacactcgacacaatattcctttctaaaatctcgtaagataaagtttatacaagtgtagatgataaattctacagaggttaatatagaagcacgtaataaattgacgacgttatgactatctatatatacctttccagtatacgagtaaataactatagaagttaaactgtgaatgtcaaggtctagacaaaccctcgtaactggatctttatttttcgtgtatttttgacgtaaatgtgtgcgaaagtaaggagataactttttcaatatcgtagaattgactattatattgccacctatagcatcaataattgttttgaatttcttagtcatagacaatgctaatatattcttacagtacacagtattaacaaatatcggcatttatgtttctttaaaagtcaacatctagagaaaaatgattatctttttgagacataactcccattttttggtattcacccacacgtttttcgaaaaaattagtttttccttccaatgatatattttccatgaaatcaaacggattggtaacattataaatttttttaaatcccaattcagaaatcaatctatccgcgacgaattctatatatgttttcatcatttcacaattcattcctataagtttaactggaagagccgcagtaagaaattcttgttcaatggatactgcatctgttataatatatctaacggtttcttcactcggtggatacaataaatgtttaaacatcaaacatgcgaaatcgcagtgcagaccctcgtctctactaattagttcgttggaaaacgtgagtccgggcattaggccacgctttttaagccaaaatatggaagcgaatgatccggaaaagaagattccttctactgcagcaaaggcaataagtctctctccataaccggcgctgtcatgtatccacttttgagcccaatcggccttcttttttacacaaggcatcgtttctatggcattaaagagatagtttttttcattactatctttaacataagtatcgatcaaaagactatacatttccgaatgaatgttttcaatggccatctgaaatccgtagaaacatctagcctcggtaatctgtacttctgtacaaaatcgttccgccaaattttcattcactattccgtcactggctgcaaaaaacgccaatacatgttttataaaatatttttcgtctggtgttagtttattccaatcattgatatctttagatatatctacttcttccactgtccaaaatgatgcctctgcctttttatacatgttccagatgtcataatattggattgggaaaataacaaatctatttggatttggtgcaaggatgggttccataactaaattaacaatatcaataaattttttttcagttatctatatgcctgtacttggattttttgtacatcgatatcgccgcaatcactacaataattacaagtattattgatagcattgttattagtactatcataattaaattatcgacattcatgggtgctgaataatcgttattatcatcattatcattttgtaattgtgacatcatactaaataaatcgtttgcgagattgttgtgggaagcgggcatggaggatgcattatcattattatttaacgccttccatttggattcacaaatgttacgcacattcaacattttatggaaactataattttgtgaaaacagataacaagaaaactcgtcatcgttcaaatttttaacgatagtaaaccgattaaacgtcgagctaatttctaacgctagcgactctgttggatatgggtttccagatatatatcttttcagttcccctacgtatctataatcatctgtaggaaatggaagatatttccatttatctactgttcctaatatcatatgtggtggtgtagtagaaccattaagcgcgaaagatgttatttcgcatcgtattttaacttcgcaataatttctggttagataacgcactctaccagtcaagtcaatgatattagcctttacagatatattcatagtagtcgtaacgatgactccatcttttagatgcgatactcctttgtatgtaccagaatcttcgtacctcaaactcgatatatttaaacaagttaatgagatattaacgcgttttatgaatgatgatatataaccagaagttttatcctcggtggctagcgctataaccttatcattataataccaactagtgtgattaatatgtgacacgttagtgtgggtacaaatatgtacattatcgtctacgtcgtattcgatacatccgcatacagccaacaaatataaaatgacaaatactctaacgccgttcgtacccatcttgatgcggtttaataaatgttttgatttcaatttattgtaaaaaaagattcggttttatactgttcgatattctcattgcttatattttcatctatcatctccacacagtcaaatccgtggttagcatgcacctcatcaaccggtaaaagactatcggactcttctatcattataactctagaatatttaatttggtcattattaatcaagtcaattatcttatttttaacaaacgtgagtattttactcattttttataaaaacttttagaaatatacagactctatcgtgtgtctatatcttctttttatatccaatgtatttatgtctgatttttcttcatttatcatatataatggtccaaattctacacgtgcttcggattcatccagatcattaaggttcttataattgtaacatccttctcttccctcttctacatcttccttcttattcttattcttagcgtcacagaatctaccacagcaggatcccatgacgagcgtcatattaaactaattcattttcaattataatatactggtaatgaccattaaaataaaaatattcttcataaccggtaagaaagtgaaaagttcacattgaaactatgtcagtagtatacatcatgaaatgatgatatatatatactctattttggtggaggattatatgatataattcgtggataatcatttttaagacacatttctttattcgtaaatcttttcacgttaaatgagtgtccatattttgcaatttcttcatatgatggcggtgtacgtggacgaggctgctcctgttcttgttgtggtcgccgactgtcgtgtctgcgtttagatccctccattatcgcgattgcgtagatggagtactattatataccttgtaattaaatttttttattaattaaacgtataaaaacgttccgtatctgtatttaagagccagatttcgtctaatagaacaaatagctacagtaaaaataactagaataattgctacacccactagaaaccacggatcgtaatacggcaatcggttttcgataataggtggaacgtatattttatttaaggacttaacaattgtctgtaaaccacaatttgcttccgcggatcctgtattaactatctgtaaaagcatatgttggccgggcggagccgaacattctccgatatccaatttctgtatatctataatattattaacctccgcatacgcattacagttcttttctagcttggatactacactaggtacatcatctagatctattcctatttcctcagcgatagctcttctatccttttccggaagcaatgaaatcacttcaataaatgattcaaccatgagtgtgaaactaagtcgagaattactcatgcatttgttagttattcggagcgcgcaatttttaaactgtcctataacctctcctatatgaatagcacaagtgacattagtagggatagaatgttgagctaatttttgtaaataactatctataaaaagattatacaaagttttaaactctttagtttccgccatttatccagtctgagaaaatgtctctcataataaatttttccaagaaactaattgggtgaagaatggaaacctttaatctatatttatcacagtctgttttggtacacatgatgaattcttctaatgctgtactaaattcgatatctttttcgatttctggatatgtttttaataaagtatgaacaaagaaatggaaatcgtaataccagttatgtttaactttgaaattgttttttattttcttgttaatgattccagccacttgggaaaagtcaaagtcgtttaatgccgatttaatacgttcattaaaaacaaactttttatcctttagatgaattattattggttcattggaatcaaaaagtaagatattatcgggtttaagatctgcgtgtaaaaagttgtcgcagcatggtagttcgtaaattttaatgtataacagagccatctgtaaaaagataaactttatgtattgtaccaaagatttaaatcctaatttgatagctaactcggtatctactttatctgcagaatacagtgctaggggaaaaattataatatttcctctttcgtattcgtagttagttctcttttcatgttcgaaaaagtgaaacatgcggttaaaatagtttataacattaatattactgttaataactgccgggtaaaagtgggatagtaatttcacgaatttgatactgtcctttctctcgttaaacgcctttaaaaaaactttagaagaatatctcaatgagagttcctgaccatccatagtttgtatcaataatagcaacatatgaagaacccgtttatacagagtatgtaaaaatgttaatttatagtttaatcccatggcccacgcacacacgattaattttttttcatctccctttagattgttgtatagaaatttgggtactgtgaactccgccgtagtttccatgggactatataattttgtggcctcgaatacaaattttactacatagttatctatcttaaagactataccatatcctcctgtagatatgtgataaaaatcgtcgtttataggataaaatcgtttatccttttgttggaaaaaggatgaattaatgtaatcattctcttctatctttagtagtgtttccctattaaaattcttaaaataatttaacaatctaactgacggagcccaattttggtgtaaatctaattgggacattatattgttaaaatacaaacagtctcctaatataacagtatctgataatctatggggagacatccattgatattcaggggatgaatcattggcaacacccatttattgtacaaaaagcccctagggataacagggtaat

SEQ ID NO: 27 - DNA, 23333 bp, Vaccinia virus
tagggataacagggtaattctttagtttccgccatttatccagtctgagaaaatgtctctcataataaatttttccaagaaactaattgggtgaagaatggaaacctttaatctatatttatcacagtctgttttggtacacatgatgaattcttctaatgctgtactaaattcgatatctttttcgatttctggatatgtttttaataaagtatgaacaaagaaatggaaatcgtaataccagttatgtttaactttgaaattgttttttattttcttgttaatgattccagccacttgggaaaagtcaaagtcgtttaatgccgatttaatacgttcattaaaaacaaactttttatcctttagatgaattattattggttcattggaatcaaaaagtaagatattatcgggtttaagatctgcgtgtaaaaagttgtcgcagcatggtagttcgtaaattttaatgtataacagagccatctgtaaaaagataaactttatgtattgtaccaaagatttaaatcctaatttgatagctaactcggtatctactttatctgcagaatacagtgctaggggaaaaattataatatttcctctttcgtattcgtagttagttctcttttcatgttcgaaaaagtgaaacatgcggttaaaatagtttataacattaatattactgttaataactgccgggtaaaagtgggatagtaatttcacgaatttgatactgtcctttctctcgttaaacgcctttaaaaaaactttagaagaatatctcaatgagagttcctgaccatccatagtttgtatcaataatagcaacatatgaagaacccgtttatacagagtatgtaaaaatgttaatttatagtttaatcccatggcccacgcacacacgattaattttttttcatctccctttagattgttgtatagaaatttgggtactgtgaactccgccgtagtttccatgggactatataattttgtggcctcgaatacaaattttactacatagttatctatcttaaagactataccatatcctcctgtagatatgtgataaaaatcgtcgtttataggataaaatcgtttatccttttgttggaaaaaggatgaattaatgtaatcattctcttctatctttagtagtgtttccctattaaaattcttaaaataatttaacaatctaactgacggagcccaattttggtgtaaatctaattgggacattatattgttaaaatacaaacagtctcctaatataacagtatctgataatctatggggagacatccattgatattcaggggatgaatcattggcaacacccatttattgtacaaaaagccccaatttacaaacgaaagtccaggtttgatagagacaaactattaactattttgtctctgtttttaatttctttagtaatgaaattattcacaatatcagtatcttctttatctaccagagattttactaacttgataaccttggctgtctcattcaatagggtagtaatatttgtatgtgtgatattgatatctttttgaattgtttcttttagaagtgattctttgatggtgccagcatacgaattacaataatgcagaaactcggttaacatgcaggaattatagtaagccaattccaattgttgcctgtgttgtattagagtgtcaatatgagcaatggtgtccttgcgtttctctgatagaatgcgagcagcgattttggcgttatcatttgacgatatttctggaatgacgaatcctgtttctactaactttttggtaggacaaagtgaaacaatcaagaagatagcttctcctcctatttgtggaagaaattgaactcctctagatgatctactgacgatagtatctccttgacagatattggaccgaattacagaagtacctggaatgtaaagccctgaaaccccctcattttttaagcagattgttgccgtaaatcctgcactgtgaccaagatagagagctcctttggtgaatccatctctatgtttcagtttaaccaagaaacagtcagctggtctaaaatttccatctctatctaatacagcatctaacttgatgtcaggaactatgaccggtttaatgttatatgtaacattgagtaaatccttaagttcataatcatcactgtcatcagttatgtacgatccaaacaatgtttctaccggcatagtggatacgaagatgctatccatcagaatgtttccctgattagtattttctatatagctattcttctttaaacgattttccaaatcagtaactatgttcatttttttaggagtaggacgcctagccagtatggaagaggattttctagatcctctcttcaacatctttgatctcaatggaatgcaaaaccccatagtgaaacaaccaacgataaaaataatattgtttttcactttttataattttaccatctgactcatggattcattaatatctttataagagctactaacgtataattctttataactgaactgagatatatacaccggatctatggtttccataattgagtaaatgaatgctcggcaataactaatggcaaatgtatagaacaacgaaattatactagagttgttaaagttaatattttctatgagctgttccaataaattatttgttgtgactgcgttcaagtcataaatcatcttgatactatccagtaaacagtctttaagttctggaatattatcatcccattgtaaagcccctaattcgactatcgaatatcctgctctgatagcagtttcaatatcgacggacgtcaatactgtaataaaggtggtagtattgtcatcatcgtgataaactactggaatatggtcgttagtaggtacggtaactttacacaacgcgatatataactttccttttgtaccatttttaacgtagttgggacgtcctgcagggtattgttttgaagaaatgatatcgagaacagatttgatacgatatttgttggattcctgattatttactataatataatctagacagatagatgattcgataaatagaaaaggtatatcgttggtaggataatacatccccattccagtattctcggatactctattaatgacactagttaagaacatgtcttctattctagaaaacgaaaacatcctacatggactcattaaaacttctaacgctcctgattgtgtctcgaatgcctcgtacaaggatttcaaggatgccatagattctttgaccaacgatttagaattgcgtttagcatctgatttttttattaaatcgaatggtcggctctctggtttgctaccccaatgataacaatagtcttgtaaagataaaccgcaagaaaatttatacgcatccatccaaataaccctagcaccatcggatgatattaatgtattattatagattttccatccacagttattgggccagtatactgttagcaacggtatatcgaatagattactcatgtaacctactagaatgatagttcgtgtactagtcataatatctttaatccaatctaagaaatataaaattagatcttttacactgttaaagttaacaaaggtattacccgggtacgtggatatcatatatggtattggtccattatcagtaatagctccataaactgatacggcgatggtttttatatgtgtttgatctaacgaggaagaaattcgcgcccacaattcatctctagatatgtatttaatatcaaacggtaacacatcaatttcgggacgcgtatatgtttctaaatttttaatccaaatataatgatgacctatatgccctattatcatactgtcaactatagtacacctagagaacttacgatacatctgtttcctgtaatcgttaaattttacaaatctataacatgctaaaccttttgacgacaaccattcattaatttctgatatggaatctgtattctcgataccgtattgttctaaagccagtgctatatctccctgttcgtgggaacgctttcgtataatatcgatcaacggataatctgaagtttttggagaataatatgactcatgatctatttcgtccataaacaatctagacataggaattggaggcgatgatcttaattttgtgcaatgagtcgtcaatcctataacttctaatcttgtaatattcatcatcgacataatactatctatgttatcatcgtatattagtataccatgaccttcttcatttcgtgccaaaataatatacagtcttaaataattacgcaatatctcaatagtttcataattgttagctgttttcatcaaggtttgtatcctgtttaacatgatggcgttctatacgtttctattttctattttttaaatttttaacgatttactgtggctagatacccaatctctctcaaatatttttttagcctcgcttacaagctgtttatctatactattaaaactgacgaatccgtgattttggtaatgggttccgtcgaaatttgccgaagtgatatgaacatattcgtcgtcgactatcaacaattttgtattattctgaatagtgaaaaccttcacagatagatcattttgaacacacaacgcgtctagacttctggcggttgccatagaatatacgtcgttcttatcccaattaccaactagaagtctgatcttaactcctctattaatggctgcttctataatggagttgtaaatgtcgggccaatagtagctattaccgtcgacacgtgtagtgggaactatggccaaatgttcaatatctatactagtcttagctgacctgagtttatcaataactacatcggtatctaaatctctagaatatcccaataggtgttccggagaatcagtaaagaacactccacctataggattcttaatatgatacgcagtgctaactggcaaacaacaagccgcagagcataaattcaaccatgaattttttgcgctattaaaggctttaaaagtatcaaatcttctacgaagatctgtggccagcgggggataatcagaatatacacctaacgttttaatcgtatgtatagatcctccagtaaatgacgcgtttcctacataacatctttcatcatctgacacccaaaaacaaccgagtagtagtcccacattattttttttatctatattaacggttataaaatttatatccgggcagtgactttgtagctctcccagatttcttttccctcgttcatctagcaaaactattattttaatccctttttcagatgcctcttttagtttatcaaaaataagcgctcccctagtcgtactcagaggattacaacaaaaagatgctatgtatatatatttcttagctagagtgataatttcgttaaaacattcaaatgttgttaaatgatcggatctaaaatccatattttctggtagtgtttctaccagcctacattttgctcccgcaggtaccgatgcaaatggccacatttagttaacataaaaacttatacatcctgttctatcaacgattctagaatatcatcggctatatcgctaaaattttcatcaaagtcgacatcacaacctaactcagtcaatatattaagaagttccatgatgtcatcttcgtttatttctatatccgtatccattgtagattgttgaccgattatcgagtttaaatcattactaatactcaatccttcagaatacaatctgtgtttcattgtaaatttataggcggtgtatttaagttggtagattttcaattatgtatcaatatagcaacagtagttcttgctcctccttgattctagcatcctcttcattattttcttctacgtacataaacatgtccaatacgttagacaacacaccgacgatggcggccgccacagacacgaatatgactaaaccgatgaccatttaaaaacccctctctagctttcacttaaactgtatcgattattcttttagaacatgtataatataaaaacattattctatttcgaatttaggcttccaaaaatttttcatccgtaaaccgataataatatatatagacttgttaatagtcggaataaatagattaatgcttaaactatcatcatttccacgattagagatacaatatttacattttttttgctgtttcgaaactttatcaatacacgttaatacaaacccaggaaggagatattgaaactgaggctgttgaaaatgaaacggtgaatacaataattcagataatgtaaaatcatgattccgtattctgatgatattagaactgctaatggatgtcgatggtatgtatctaggagtatctattttaacaaagcatcgatttgctaatatacaattatccttttgattaattgttattttattcatattcttaaaaggtttcatatttatcaattcttctacattaaaaatttccatttttaatttatgtagccccgcaatactcctcattacgtttcattttttgtctataatatccattttgttcatctcggtacatagattatccaattgagaagcgcatttagtagttttgtacattttaagtttattgacaaatcgtcgaaaactagttatagttaacattttattatttgataccctgatattaatacccctgccgttactattatttataactgatgtaacccacgtaacattagaattaattatcgatagtaatgcatcaacgcttccaaaattgtctattataaactcaccgataatttttttattacatgttttcatattcattaggattatcaaatctttaatcttactacgattgtatgcgttgatattgcaagacgtcattctaaaagacggaggatctccatcaaatgccaaacaatcacgtacaaagtacatggaaataggttttgttctattgcgcatcatagatttatatagaacacccgtagaaatactaatttgttttactctataaaatactaatgcatctatttcatcgttttgtataacgtctttccaagtgtcaaattccaaatttttttcattgatagtaccaaattcttctatctctttaactacttgcatagataggtaattacagtgatgcctacatgccgttttttgaaactgaatagatgcgtctagaagcgatgctacactagtcacaatcaccactttcatatttagaatatatgtatgtaaaaatatagtagaatttcattttgtttttttctatgctataaatgaattctcattttgcatctgctcatactccgttttatatcaataccaaagaaggaagatatctggttctaaaagccgttaaagtatgcgatgttagaactgtagaatgcgaaggaagtaaagcttcctgcgtactcaaagtagataaaccctcatcacccgcgtgtgagagaagaccttcgtccccgtccagatgcgagagaatgaataaccctggaaaacaagtcccgtttatgagaacggacatgctacaaaatatgttcgcggctaatcgcgacaacgtggcgtcgagacttttgaactaaaatacaattatatctttttcgatattaataaatccgtgtcgcccgggttttttatctctttcagtatgtgaatagataggtattttatctctattcatcatcgaatttaagagatccgataaacattgtttgtattctccagatgtcagcatctgatacaacaatatatgtgcacataaacctctggcacttatttcatgtaccttccccttatcactaaggagaatagtatttgagaaatatgtatacatgatattatcatgaattagatatacagaatttgtaacactctcgaaatcacacgatgtgtcggcgttaagatctaatatatcactcgataacacattttcatctagatacactagacattttttaaagctaaaatagtctttagtagtgacagtaactatgcgattattttcatcgatgatacatttcatcggcatattattacgcttaccatcaaagactataccatgtgtatatctaacgtattctagcatggttgccatacgcgcattaaacttttcaggatctttggatagatcttccaatctatctatttgagaaaacatttttatcatgttcaatagttgaaacgtcggatccactatatagatattatctataaagattttaggaactacgttcatggtatcctggcgaatattaaaactatcaatgatatgattatcgttttcatcttttatcaccatatagtttctaagatatgggattttacttaatataatattatttcccgtgataaattttattagaaaggccaaatctataagaaaagtcctagaattagtctgaagaatatctatatcgccgtatagtatatttggattaattagatatagagaatatgatccgtaacatatacaacttttattatggcgtctaagatattcttccatcaacttattaacatttttgactagggaagatacattatgacgtcccattacttttgccttgtctattactgcgacgttcatagaatttagcatatctcttgccaattcttccattgatgttacattataagaaattttagatgaaattacatttggagctttaatagtaagaactcctaatatgtccgtgtatgtggtcactaatacagattgtagttctataatcgtaaataatttacctatattatatgtttgagtctgtttagaaaagtagctaagtatacgatcttttatttctgatgcagatgtatcaacatcggaaaaaaatctttttttattcttttttactaaagatacaaatatgtctttgttaaaaacagttattttctgaatatttctagcttgtaattttaacatatgatattcgttcacactaggtactctgcctaaataggtttctataatctttaatgtaatattaggaaaagtattctgatcaggattcctattcattttgaggatttaaaactctgattattgtctaatattgtctctacgcaaactttttcacagagcgatagagtttttgataactcgtttttcttaagaaatataaaactactgtctccagagctcgctctatcttttattttatctaattcgatacaaactcctgatactggttcagaaagtaattcattaattttcagtcctttatagaagatatttaatatagataatacaaaatcttcagtttttgatatcgatctgattgatcctagaactagatatattaataacgtgctcattaggcagtttatggcagcttgataattagatatagtatattccagttcatatttattagataccgcattgcccagattttgatattctatgaattcctctgaaaataaatccaaaataactagacattctattttttgtggattagtgtactctcttccctctatcatgttcactactggtgtccacgatgataaatatctagagggaatataatatagtccataggatgccaatctagcaatgtcgaataactgtaattttattcttcgctcttcattatgaattgattcttgaggtataaacctaacacaaattatattattagacttttcgtatgtaatgtctttcatgttataagtttttaatcctggaatagaatctattttaatgaggcttttaaacgcagagttctccaacgagtcaaagcataatactctgttgtttttcttatatacgatgttacgattttcttctttgaatggaataggtttttgaattagtttataattacaacataatagataaggaagtgtgcaaatagtacgcggaaaaaacataatagctcccctgttttcatccatggttttaagtaaatgatcactggcttctttagtcaatggatattcgaacattaaccgtttcatcatcattggacagaatccatatttcttaatgtaaagagtgatcaaatcattgtgtttattgtaccatcttgttgtaaatgtgtattcggttatcggatctgctcctttttctattaaagtatcgatatcgatctcgtctaagaattcaactatatcgacatatttcatttgtatacacataaccattactaacgtagaatgtataggaagagatgtaacgggaacagggtttgttgattcgcaaactattctaatacataattcttctgttaatacgtcttgcacgtaatctattatagatgccaagatatctatataattattttgtaagatgatgttaactatgtgatctatataagtagtgtaataattcatgtattttgatatatgttccaactctgtctttgtgatgtctagtttcgtaatatctatagcatcctcaaaaaatatattcgcatatattcccaagtcttcagttctatcttctaaaaaatcttcaacgtatggaatataataatctattttacctcttctgatatcattaatgatatagtttttgacactatcttctgtcaattgattcttattcactatatctaagaaacggatagcgtccctaggacgaactactgccattaatatctctattatagcttctggacataattcatctattataccagaattaatgggaactattccgtatctatctaacatagttttaagaaagtcagaatctaagacttgatgttcatatattggttcatacatgaaatgatctctattgatgatagtgactatttcgttctctgaaaattggtaactcattttatatatgctttccttgttgatgaaggataggatatactcaatagaatttgtaccaacaaactgttctcttatgaatcgtatatcatcatctgaaataatcatgtaaggcatacatttaacaattagagacttgtctcctgttatcaatatactattcttgtgataatttatgtgtgaggcaaatttgtccacgttctttaattttgttatagtagatatcaaatccaatggagctacagttcttggcttaaacagatatagtttttctggaacgaattctacaacattattataaaggactttgggtagataagtgggatgaaatcctattttaattaatgctatcgcattgtcctcgtgcaaatatccaaacgcttttgtgatagtatgacattcattatctagaaacgctctacgaatatctgtcacagatatcatctttagagaatactagttgcgttaatagtactaaaatttgtattttttttaatatatctcaaaaaaaattaatatttatggatccgatgtataattagaatcagaatctaatgatgacgtacccaagaagtttatctacagccaatttagctgcattatttttagcatctcgtttagattttccatcggccttatcgaatactcttccgtcgatatctacacaggcataaaatgtaggagagttactaggcccaactgattcaatacgaaaagaccaatctctcttagttatttggcagtactcattaataatggtgacagggttagcatctttccaatcaataatttttttagccggaataacatcatcaaaagacttatgatcctctctcattgatttttcgcgggatacatcatctattatggcgtcagccataacatcagcatccggcttatccgcctccgttgtcataaaccaacgaggaggaatatcgtcggagctgtacaccatagcactacgttgaagatcgtacagagctttattaacttctcgcttctccatattaagttgtctagttagttgtgcagcagtagctccttcgattccaatgtttttaatagccgcacacacaatctctgcgtcagaacgctcgtcaatatagatcttagacatttttagagagaactaacacaaccagcaataaaactgaacctactttatcatttttttattcatcatcctctggtggttcgtcgttcctatcgaatgtggatctgattaacccgtcatctataggtgatgctggttctggagattctggaggagatggattattatctggaagaatctctgttatttccttgttttcatgtatcgattgcgttgtaacattaagattgcgaaatgctctaaatttgggaggcttaaagtgttgtttgcaatctctacacgcatgtctaactagtggaggttcgtcagcggctctagtttgaatcatcatcggcgtagtattcctacttttacagttaggacacggtgtattgtatttctcgtcgagaacgttaaaataatcgttgtaactcacatcctttattttatctatattgtattctactcctttcttaatgcattttataccgaataagagatagcgaaggaattctttttcggtgccgctagtacccttaatcatatcacatagtgttttatattccaaatttgtggcaatagacggtttatttctatacgatagtttgtttctggaatcctttgagtattctataccaatattattctttgattcgaatttagtttcttcgatattagattttgtattacctatattcttgatgtagtactttgatgatttttccatggcccattctattaagtcttccaagttggcatcatccacatattgtgatagtaattctcggatatcagtagcggctaccgccattgatgtttgttcattggatgagtaactactaatgtatacattttccatttataacacttatgtattaactttgttcatttatattttttcattattatgttgatattaacaaaagtgaatatatatgttaataattgtattgtggttatacggctacaatttcataatgagtggaagtcagtgtccgatgatcaatgacgatagctttactctgaaaagaaagtatcaaatcgatagtgcggagtcaacaatgaaaatggataagaagaggacaaagtttcagaatagagccaaaatggtaaaagaaataaatcagacaataagagcagcacaaactcattacgagacattgaaactaggatacataaaatttaagagaatgattatgactactactctagaagatatagcaccatctattccaaataatcagaaaacttataaactattctcggacatttcagccatcggcaaagcatcacggaatccaagtaagatggtatatgctctgctgctttacatgtttcccaatttgtttggagatgaccatagattcattcgttatagaatgcatccaatgagtaaaatcaaacacaagatcttctctcctttcaaacttaatcttattagaatattagtggaagaaagattctataataatgaatgcagatctaataaatggaacacaagttgataaaatgttgatagctgaatctgataaatatacaatagatgcaaggtataacctaaaacccatgtatagaatcaagggagaatctgaagaagataccctcttcatcaaacagatggtagaacaatgtgtgacatcccaggaattggtggaaaaagtgttgaagatactgtttagagatttgttcaagagtggagaatacaaagcatacagatacgatgatgatgtagaaaatggatttattggattggatacactaaaattaaacattgttcatgatatagttgaaccatgtatgcctgttcgtaggccagtggctaagatactgtgtaaagaaatggtaaataaatactttgagaatccgctacatattattggtaaaaatcttcaagagtgcattgactttgttagtgaataggcatttcatctttctccaatactaattcaaattgttaaattaataatggatagtataaatagttattagtgataaaatagtaaaaataattattagaataagagtgtagtatcatagataactctcttctataaaaatggattttattcgtagaaagtatcttatatacacagtagaaaataatatagattttttaaaggatgatacattaagtaaagtaaacaattttaccctcaatcatgtactagctctcaagtatctagttagcaattttcctcaacacgttattactaaggatgtattagctaataccaatttttttgttttcatacatatggtacgatgttgtaaagtgtacgaagcggttttacgacacgcatttgatgcacccacgttgtacgttaaagcattgactaagaattatttatcgtttagtaacgcaatacaatcgtacaaggaaaccgtgcataaactaacacaagatgaaaaatttttagaggttgccgaatacatggacgaattaggagaacttataggcgtaaattatgacttagttcttaatccattatttcacggaggggaacccatcaaagatatggaaatcatttttttaaaactgtttaagaaaacagacttcaaagttgttaaaaaattaagtgttataagattacttatttgggcttacctaagcaagaaagatacaggcatagagtttgcggataatgatagacaagatatatacactctatttcaacaaactggtagaatagtccatagcaatctaacagaaacgtttagagattatatctttcccggagataagactagctattgggtgtggttaaacgaaagtatagctaatgatgcggatattgttcttaatagacacgccattaccatgtatgataaaattcttagttatatatactctgagataaaacaaggacgcgttaataaaaacatgcttaagttagtttatatctttgagcctgaaaaagatatcagagaacttctgctagaaatcatatatgatattcctggagatatcctatctattattgatgcaaaaaacgacgattggaaaaaatattttattagtttttataaagctaattttattaacggtaatacatttattagtgataaaacgtttaacgaggacttattcagagttgttgttcaaataaatcccgaatatttcgataatgaacgaattatgtctttattctctacgagtgctgcggacattaaacgatttgatgagttagatattaataacagttatatatctaatataatttatgaggtgaacgatatcacattagatacaatggatgatatgaagaagtgtcaaatctttaacgaggatacgtcgtattatgttaaggaatacaatacatacctgtttttgcacgagtcggatcccatggtcatagagaacggaatactaaagaaactgtcatctataaaatccaagagtagacggctgaacttgtttagcaaaaacattttaaaatattatttagacggacaattggctcgtctaggtcttgtgttagatgattataaaggagacttgttagttaaaatgataaaccatcttaagtctgtggaggatgtatccgcattcgttcgattttctacagataaaaaccctagtattcttccatcgctaatcaaaactattttagctagttataatatttccatcatcgtcttatttcaaaggtttttgagagataatctatatcatgtagaagaattcttggataaaagcatccatctaaccaagacggataagaaatatatacttcaattgataagacacggtagatcatagaacagaccaaatatattattaataatttgtatatacatagatataattatcacatattaaaaattcacacatttttgataaatgggaactgctgcaacaattcagactcccaccaaattaatgaataaagaaaatgcagaaatgattttggaaaaaattgttgatcatatagttatgtatattagtgacgaatcaagtgattcagaaaataatcctgaatatattgattttcgtaacagatacgaagactatagatctctcattataaaaagtgatcacgagtttgtaaagctatgtaaaaatcatgcggagaaaagttctccagaaacgcaacaaatgattatcaaacacatatacgaacaatatcttattccagtatctgaagtactattaaaacctataatgtccatgggtgacataattacatataacggatgtaaagacaatgaatggatgctagaacaactctctaccctaaactttaacaatctccgcacatggaactcatgtagcataggcaatgtaacgcgtctgttttatacattttttagttatctgatgaaagataaactaaatatataagtataatcccattctaatactttaacctgatgtattagcatcttattagaatattaacctaactaaaagacataacataaaaactcattacatagttgataaaaagcggtaggatataaatattatggctgccaccgttccgcgttttgacgacgtgtacaaaaatgcacaaagaagaattctagatcaagaaacattttttagtagaggtctaagtagaccgttaatgaaaaacacatatctatttgataattacgcgtatggatggataccagaaactgcaatttggagtagtagatacgcaaacctagatgctagtgactattatcccatttcgttgggattacttaaaaagtttgagtttctcatgtctctatataaaggtcctattcccgtatatgaagaaaaagtaaatactgaattcattgctaatggatctttctccggtagatatgtatcatatcttagaaagttttctgctcttccaacaaacgagtttattagttttttgttactgacttccattccaatctataatatcttgttctggtttaaaaatactcagtttgatattactaaacacacattattcagatacgtctatacagataatgccaaacacctggcgttggctaggtatatgcatcaaacaggagactataagcctttgtttagtcgtctcaaagagaattatatatttaccggtcccgttccaataggtatcaaagatatagatcaccctaatcttagtagagcaagaagtccatccgattatgagacattagctaatattagtactatattgtactttaccaagtatgatccggtattaatgtttttattgttttacgtacctgggtattcaattactacaaaaattactccagccgtagaatatctaatggataaactgaatctaacaaagagcgacgtacaactgttgtaaattattttatgcttcgtaaaatgtaggttttgaaccaaacattctttcaaagaatgagatgcataaaactttattatccaatagattgactatttcggacgtcaatcgtttaaagtaaacttcgtaaaatattctttgatcactgccgagtttaaaacttctatcgataattgtttcatatgttttaatatttacaagttttttggtccatggtccattaggacaaatatatgcaaaataatatcgttctccaagttctatagtctctggattatttttattatattcagtaaccaaatacatattagggttatctgcggatttataatttgagtgatgcattcgactcaacataaataattctagaggagacgatctactatcaaattcggatcgtaaatctgtttctaaagaacggagaatatctatacatacctgattagaattcatccgtccttcagacaacatctcagacagtctggttttgtacatcttaatcatattcttatgaaacttggaaacatctcttctagtttcactagtacctttattaattctctcaggtacagattttgaattcgacgatgctgagtatttcatcgttgtatatttcttcttcgattgcataatcagattcttatataccgcctcaaactctattttaaaattattaaacaatactctattattaatcagtcgttctaactctttcgctatttctatagacttatcgacatcttgactgtctatctctgtaaacacggagtcggtatctccatacacgctacgaaaacgaaatctgtaatctataggcaacgatgttttcacaatcggattaatatctctatcgtccatataaaatggattacttaatggattggcaaaccgtaacataccgttagataactctgctccatttagtaccgattctagatacaagatcattctacgtcctatggatgtgcaactcttagccgaagcgtatgagtatagagcactatttctaaatcccatcagaccatatactgagttggctactatcttgtacgtatattgcatggaatcatagatggccttttcagttgaactggtagcctgttttaacatctttttatatctggctctctctgccaaaaatgttcttaatagtctaggaatggttccttctatcgatctatcgaaaattgctatttcagagatgaggttcggtagtctaggttcacaatgaaccgtaatatatctaggaggtggatatttctgaagcaatagctgattatttatttcttcttccaatctattggtactaacaacgacaccgactaatgtttccggagatagatttccaaagatacacacattaggatacagactgttataatcaaagattaatacattattactaaacattttttgttttggagcaaataccttaccgccttcataaggaaacttttgttttgtttctgatctaactaagatagttttagtttccaacaatagctttaacagtggacccttgatgactgtactcgctctatattcgaataccatggattgaggaagcacatatgttgacgcacccgcgtctgtttttgtttctactccataatactcccacaaatactgacacaaacaagcatcatgaatacagtatctagccatatctaaagctatgtttagattataatccttatacatctgagctaaatcaacgtcatcctttccgaaagataatttatatgtatcattaggtaaagtaggacataatagtacgactttaaatccattttcccaaatatctttacgaattactttacatataatatcctcatcaacagtcacataattacctgtggttaaaacctttgcaaatgcagcggctttgcctttcgcgtctgtagtatcgtcaccgatgaacgtcatttctctaactcctctatttaatactttacccatgcaactgaacgcgttcttggatatagaatccaatttgtacgaatccaatttttcagatttttgaatgaatgaatatagatcgaaaaatatagttccattattgttattaacgtgaaacgtagtattggccatgccgcctactcccttatgactagactgatttctctcataaatacagagatgtacagcttcctttttgtccggagatctaaagataatcttctctcctgttaataactctagacgattagtaatatatctcagatcaaagttatgtccgttaaaggtaacgacgtagtcgaacgttagttccaacaattgtttagctattcgtaacaaaactatttcagaacatagaactagttctcgttcgtaatccatttccattagtgactgtatcctcaaacatcctctatcgacggcttcttgtatttcctgttccgttaacatctcttcattaatgagcgtaaacaataatcgtttaccacttaaatcgatataacagtaacttgtatgcgagattgggttaataaatacagaaggaaacttcttatcgaagtgacactctatatctagaaataagtacgatcttgggatatcgaatctaggtatttttttagcgaaacagttacgtggatcgtcacaatgataacatccattgttaatctttgtcaaatattgctcgtccaacgagtaacatccgtctggagatatcccgttagaaatataaaaccaactaatattgagaaattcatccatggtggcattttgtatgctgcgtttctttggctcttctatcaaccacatatctgcgacggagcattttctatctttaatatctagattataacttattgtctcgtcaatgtctatagttctcatctttcccaacggcctcgcattaaatggaggaggagacaatgactgatatatttcgtccgtaactacgtaataaaagtaatgaggaaatcgtataaatacagtctcaccatttcgacatctggatttcagatataaaaatctgttttcaccgtgactttcaaaccaattaatgcaccgaacatccatttctagaatttagaaatatattttcatttaaatgaatcccaaacattggggaagagccgtatggaccattatttttatagtactttcgcaagcgggtttagacggcaacatagaagcgtgtaaacgaaaactatatactatagtcagcactcttccatgtcctgcatgtagacggcacgcgactatcgctatagaggacaataatgtcatgtctagcgatgatctgaattatatttattattttttcatcagattatttaacaatttggcatctgatcccaaatacgcaatcaatgtgtcaaaggttaaccctttataaacttaacccattataaaacttatgattagtcacaactgaaataaccgcgtgattattttttggtataattctacacggcatggtttctgtgactatgaattcaacccccgttacattagtgaaatctttaacaaacagcaagggttcgtcaaagacataaaactcattgtttacaatcgaaatagaccccctatcacacttaaaataaaaaatatccttatcctttaccaccaaataaaattctgattggtcaatgtgaatgtattcacttaacagttccacaaatttatttattaactccgaggcacatacatcgtcggtattttttatggcaaactttactcttccagcatccgtttctaaaaaaatattaacgagttccatttatatcatccaatattattgaaatgacgttgatggacagatgatacaaataagaaggtacggtacctttgtccaccatctcctccaattcatgctctattttgtcattaactttaatgtatgaaaacagtacgccacatgcttccatgacagtgtgtaacactttggatacaaaatgtttgacattagtataattgtccaagactgtcaatctataatagatagtagctataatatattctatgatggtattgaagaagatgacaaccttggcatattgatcatttaacacagacatggtatcaacagatagcttgaatgaaagagaatcagtaattggaataagcgtcttctcgatagagtgtccgtataccaacatgtctgatattttgatgtattccattaaattatttagttttttctttttattttcgttaaacagcatttctgtcaacggaccccaacatcgttgaccgattaagttttgattgatttttccgtgtaaggcgtatctagtcagatcgtatagcctatccaataatccatcatctgtgcgtagatcacatcgtacactttttaattctctatagaagagcgacagacatctggagcaattacagacagcaatttctttattctctacagatgtaagatacttgaagacattcctatgatgatgcagaattttggataacacggtattgatggtatctgttaccataattcctttgatggctgatagtgtcagagcacaagatttccaatctttgacaatttttagcaccattatctttgttttgatatctatatcagacagcatggtgcgtctgacaacacagggattaagacggaaagatgaaatgattctctcaacatcttcaatggataccttgctattttttctggcattatctatatgtgcgagaatatcctctagagaatcagtatcctttttgatgatagtggatctcaatgacatgggacgtctaaaccttcttattctatcaccagattgcatggtgatttgtcttctttcttttatcataatgtaatctctaaattcatcggcaaattgtctatatctaaaatcataatatgagatgtttacctctacaaatatctgttcgtccaatgttagagtatctacatcagttttgtattccaaattaaacatggcaacggatttaattttatattcctctattaagtcctcgtcgataataacagaatgtagataatcatttaatccatcgtacatggttggaagatgcttgttgacaaaatctttaattgtcttgatgaaggtgggactatatctaacatcttgattaataaaatttataacattgtccataggatactttgtaactagttttatacacatctcttcatcggtaagtttagacagaatatcgtgaacaggtggtatattatattcatcagatatacgaagaacaatgtccaaatctatattgtttaatatattatatagatgtagcgtagctcctacaggaatatctttaactaagtcaatgatttcatcaaccgttagatctattttaaagttaatcatataggcattgatttttaaaaggtatgtagccttgactacattttcattaattaaccattccaagtcactgtgtgtaagaagattatattctatcataagcttgactacatttggtcccaataccattaaagaattcttatgatataaggaaacagcttttaggtactcatctactctacaagaattttggagagccttaacgatatcagtgacgtttattatttcaggaggaaagaatctaacattgagaatatcggaattaatagcttccagatacagtgattttggcaatagtccgtgtaatccataatccagtaacacgagctggtgcttgctagacaccttttcaatgtttaatttttttgaaataagctttgataaagccttcctcgcaaattccggatacatgaacatgtcggcgacatgattaagtattgttttttcattattttctcaacaagttctcaataccccaatagatgatagaatatcacccaatgcgtccatgttgtctatttccaacaggtcgctatatccaccaatagaagttttcccaaaaaagattctaggaacagttctaccaccagtaatttgttcaaaataatcccgcaattcattttcgggtttaaattctttaatatcgacaatttcatacgctcctcttttgaaactaaacttatttagaatatccagtgcatttctacaaaaaggacatgtatacttgacaaaaattgtcactttgttattggccaacctttgttgtacaaattcctcggccattttaatatttaagtgatataaaactatctcgacttatttaactctttagtcgagatatatggacgcagatagctatatgatagtagggataacagggtaat

SEQ ID NO: 28 - DNA, 26445 bp, Vaccinia virus
tagggataacagggtaattttctagaatttagaaatatattttcatttaaatgaatcccaaacattggggaagagccgtatggaccattatttttatagtactttcgcaagcgggtttagacggcaacatagaagcgtgtaaacgaaaactatatactatagtcagcactcttccatgtcctgcatgtagacggcacgcgactatcgctatagaggacaataatgtcatgtctagcgatgatctgaattatatttattattttttcatcagattatttaacaatttggcatctgatcccaaatacgcaatcaatgtgtcaaaggttaaccctttataaacttaacccattataaaacttatgattagtcacaactgaaataaccgcgtgattattttttggtataattctacacggcatggtttctgtgactatgaattcaacccccgttacattagtgaaatctttaacaaacagcaagggttcgtcaaagacataaaactcattgtttacaatcgaaatagaccccctatcacacttaaaataaaaaatatccttatcctttaccaccaaataaaattctgattggtcaatgtgaatgtattcacttaacagttccacaaatttatttattaactccgaggcacatacatcgtcggtattttttatggcaaactttactcttccagcatccgtttctaaaaaaatattaacgagttccatttatatcatccaatattattgaaatgacgttgatggacagatgatacaaataagaaggtacggtacctttgtccaccatctcctccaattcatgctctattttgtcattaactttaatgtatgaaaacagtacgccacatgcttccatgacagtgtgtaacactttggatacaaaatgtttgacattagtataattgtccaagactgtcaatctataatagatagtagctataatatattctatgatggtattgaagaagatgacaaccttggcatattgatcatttaacacagacatggtatcaacagatagcttgaatgaaagagaatcagtaattggaataagcgtcttctcgatagagtgtccgtataccaacatgtctgatattttgatgtattccattaaattatttagttttttctttttattttcgttaaacagcatttctgtcaacggaccccaacatcgttgaccgattaagttttgattgatttttccgtgtaaggcgtatctagtcagatcgtatagcctatccaataatccatcatctgtgcgtagatcacatcgtacactttttaattctctatagaagagcgacagacatctggagcaattacagacagcaatttctttattctctacagatgtaagatacttgaagacattcctatgatgatgcagaattttggataacacggtattgatggtatctgttaccataattcctttgatggctgatagtgtcagagcacaagatttccaatctttgacaatttttagcaccattatctttgttttgatatctatatcagacagcatggtgcgtctgacaacacagggattaagacggaaagatgaaatgattctctcaacatcttcaatggataccttgctattttttctggcattatctatatgtgcgagaatatcctctagagaatcagtatcctttttgatgatagtggatctcaatgacatgggacgtctaaaccttcttattctatcaccagattgcatggtgatttgtcttctttcttttatcataatgtaatctctaaattcatcggcaaattgtctatatctaaaatcataatatgagatgtttacctctacaaatatctgttcgtccaatgttagagtatctacatcagttttgtattccaaattaaacatggcaacggatttaattttatattcctctattaagtcctcgtcgataataacagaatgtagataatcatttaatccatcgtacatggttggaagatgcttgttgacaaaatctttaattgtcttgatgaaggtgggactatatctaacatcttgattaataaaatttataacattgtccataggatactttgtaactagttttatacacatctcttcatcggtaagtttagacagaatatcgtgaacaggtggtatattatattcatcagatatacgaagaacaatgtccaaatctatattgtttaatatattatatagatgtagcgtagctcctacaggaatatctttaactaagtcaatgatttcatcaaccgttagatctattttaaagttaatcatataggcattgatttttaaaaggtatgtagccttgactacattttcattaattaaccattccaagtcactgtgtgtaagaagattatattctatcataagcttgactacatttggtcccaataccattaaagaattcttatgatataaggaaacagcttttaggtactcatctactctacaagaattttggagagccttaacgatatcagtgacgtttattatttcaggaggaaagaatctaacattgagaatatcggaattaatagcttccagatacagtgattttggcaatagtccgtgtaatccataatccagtaacacgagctggtgcttgctagacaccttttcaatgtttaatttttttgaaataagctttgataaagccttcctcgcaaattccggatacatgaacatgtcggcgacatgattaagtattgttttttcattattttctcaacaagttctcaataccccaatagatgatagaatatcacccaatgcgtccatgttgtctatttccaacaggtcgctatatccaccaatagaagttttcccaaaaaagattctaggaacagttctaccaccagtaatttgttcaaaataatcccgcaattcattttcgggtttaaattctttaatatcgacaatttcatacgctcctcttttgaaactaaacttatttagaatatccagtgcatttctacaaaaaggacatgtatacttgacaaaaattgtcactttgttattggccaacctttgttgtacaaattcctcggccattttaatatttaagtgatataaaactatctcgacttatttaactctttagtcgagatatatggacgcagatagctatatgatagccaactacagaaggcaaacgctataaaaaacataattacgacgagcatatttataaatatttttattcagcattacttgatatagtaatattaggcacagtcaaacattcaaccactctcgatacattaactctctcattttctttaacaaattctgcaatatcttcgtaaaaagattcttgaaactttttagaatatctatcgactctagatgaaatagcgttcgtcaacatactatgttttgtatacataaaggcgcccattttaacagtttctagtgacaaaatgctagcgatcctaggatcctttagaatcacatagattgacgattcgtctctcttagtaactctagtaaaataatcatacaatctagtacgcgaaataatattatccttgacttgaggagatctaaacaatctagttttgagaacatcgataagttcatcgggaatgacatacatactatctttaatagaactcttttcatccagttgaatggattcgtccttaaccaactgattaatgagatcttctattttatcattttccagatgatatgtatgtccattaaagttaaattgtgtagcgcttctttttagtctagcagccaatactttaacatcactaatatcgatatacaaaggagatgatttatcgatggcattaagaattcgtttttcgacatctgtcaaaaccaattcctttttgcctgtatcatccagttttccatcctttgtaaagaaattattttctactagactattaataagactgataaggattcctccataattgcacaatccaaactttttcacaaaactagactttacaagatctacaggaatgcgtacttcaggtttcttagcttgtgattttttcttttgtggacattttcttgtgaccaactcatctaccatttcattgattttagcagtgaaataagctttcaatgcacgggcactgatactattgaaaacgagttgatcttcaaattccgccatttaagttcaccaaacaacttttaaatacaaatatatcaatagtagtagaataagaactataaaaaaaataataattaaccaataccaaccccaacaaccggtattattagttgatgtggtagttttctcatcacttagaacagatttaacaatttctataaagtctgtcaaatcatctttcggagaacccatatatacaccaaatatagcggcgtacaacttatccatttatacattgaatattggcttttctttatcgctatcttcatcatattcatcatcaatatcaacaagtcccagattacgagccagatcttcttctacattttcagtcattgatacacgttcactatctccagagagtccgataacgttagccaccacttctctatcaatgattagtttcttgagtgcgaatgtaatttttgtttccgttccggatctatagaaaactacaggtgtgataattgccttggccaattgtctttctcttttactgagtgattctagttcaccttctatagatctgagaatggatgattctccagtcgaaacatattctaccatggatccgtttaatttgttgatgaagatggattcatccttaaatgttttctctgtaatagtttccaccgaaagactatgcaaagaatttggaatgcgttccttgtgcttaatgtttccatagacggcttctagaagttgatacaacataggactagccgcggtaacttttatttttagaaagtatccatcgcttctatcttgtttagatttatttttataaagtttagtctctccttccaacataataaaagtggaagtcatttgactagataaactatcagtaagttttatagagatagacgaacaattagcgtattgagaagcatttagtgtaacgtattcgatacattttgcattagatttactaatcgattttgcatactctataacacccgcacaagtctgtagagaatcgctagatgcagtaggtcttggtgaagtttcaactctcttcttgattaccttactcatgattaaacctaaataattgtactttgtaatataatgatatatattttcactttatctcatttgagaataaaaatgtttttgtttaaccactgcatgatgtacagatttcggaatcgcaaaccaccagtggttttattttatccttgtccaatgtgaattgaatgggagcggatgcgggtttcgtacgtagatagtacattcccgtttttagaccgagactccatccgtaaaaatgcatactcgttagtttggaataactcggatctgctatatggatattcatagattgactttgatcgatgaaggctcccctgtctgcagccatttttatgatcgtcttttgtggaatttcccaaatagttttataaactcgcttaatatcttctggaaggtttgtattctgaatggatccaccatctgccataatcctattcttgatctcatcattccataattttctctcggttaaaactctaaggagatgcggattaactacttgaaattctccagacaatactctccgagtgtaaatattactggtatacggttccaccgactcattatttcccaaaatttgagcagttgatgcagtcggcataggtgccaccaataaactatttctaagaccgtatgttctgattttatcttttagaggttcccaattccaaagatccgacggtacaacattccaaagatcatattgtagaataccgttactggcgtacgatcctacatatgtatcgtatggtccttccttctcagctagttcacaactcgcctctaatgcaccgtaataaatggtttcgaagatcttcttatttagatcttgtgcttccaggctatcaaatggataatttaagagaataaacgcgtccgctaatccttgaacaccaataccgataggtctatgtctcttattagagatttcagcttctggaataggataataattaatatctataattttattgagatttctgacaattactttgaccacatccttcagtttgagaaaatcaaatcgcccatctattacaaacatgttcaaggcaacagatgccagattacaaacggctacctcattagcatccgcatattgtattatctcagtgcaaagattactacacttgatagttcctaaattttgttgattactctttttgttacacgcatccttataaagaatgaatggagtaccagtttcaatctgagattctataatcgctttccagacgactcgagcctttattatagatttgtatctcctttctctttcgtatagtgtatacaatcgttcgaactcgtctccccaaacattgtccaatccaggacattcatccggacacatcaacgaccactctccgtcatccttcactcgtttcataaagagatcaggaatccaaagagctataaatagatctctggttctatgttcctcgtttcctgtattctttttaagatcgaggaacgccataatatcagaatgccacggttccaagtatatggccataactccaggccgtttgtttcctccctgatctatgtatctagcggtgttattataaactctcaacattggaataataccgtttgatataccattggtaccggagatatagcttccactggcacgaatattactaattgatagacctattccccctgccattttagagattaatgcgcatcgttttaacgtgtcatagataccctctatgctatcatcgatcatgttaagtagaaaacagctagacatttggtgacgactagttcccgcattaaataaggtaggagaagcgtgcgtaaaccatttttcagaaagtagattgtacgtctcaatagctgagtctatatcccattgatgaattcctactgcgacacgcattaacatgtgctgaggtctttcaacgatcttgttgtttattttcaacaagtaggatttttccaaagttttaaaaccaaaatagttgtatgaaaagtctcgttcgtaaataataaccgagttgagtttatccttatatttgttaactatatccatggtgatacttgaaataatcggagaatgtttcccatttttaggattaacatagttgaataaatcctccatcacttcactaaatagtttttttgtttccttgtgtagatttgatacggctattctggcggctagaatggcataatccggatgttgtgtagtacaagtggctgctatttcggctgccagagtgtccaattctaccgttgttactccattatatattccttgaataaccttcatagctattttaataggatctatatgatccgtgtttaagccataacataattttctaatacgagacgtgattttatcaaacatgacattttccttgtatccatttcgtttaatgacaaacatttttgttggtgtaataaaaaaattatttaacttttcattaatagggatttgacgtatgtagcgtacaaaattatcgttcctggtatatagataaagagtcctatatatttgaaaatcgttacggctcgattaaactttaatgattgcatagtgaatatatcattaggatttaactccttgactatcatggcggcgccagaaattaccatcaaaagcattaatacagttatgccgatcgcagttagaacggttatagcatccaccatttatatctaaaaattagatcaaagaatatgtgacaaagtcctagttgtatactgagaattgacgaaacaatgtttcttacatatttttttcttattagtaaccgacttaatagtaggaactggaaaactagacttgattattctataagtatagatacccttccaaataatattctctttgataaaagttccagaaaatgtagaattttttaaaaagttatcttttgctattaccaagattgtgtttagacgcttattattaatatgagtgatgaaatccacaccgcctctagatatcgcttttatttccacattagatggtaaatccaatagtgaaactatctttttaggaatgtatggactcgcgtttagaggagtgaacgtcttgggcgtcggaaaggatgattcgtcaaacgaataaacaatttcacaaatggatgttaatgtattagtaggaaattttttgacgctagtggaattgaagattctaatggatgatgttctacctatttcatccgataacatgttaatttccgacaccaacggttttaatatttcgatgatatacggtagtctctctttcggacttatatagcttattccacaatacgagtcattatatactccaaaaaacaaaataactagtataaaatctgtatcgaatgggaaaaacgaaattatcgacataggtatagaatccggaacattgaacgtattaatacttaattctttttctgtggtaagtaccgataggttattgacattgtatggttttaaatattctataacttgagacttgatagatattagtgatgaattgaaaattatttttatcaccacgtgtgtttcaggatcatcgtcgacgcccgtcaaccaaccgaatggagtaaaataaatatcattaatatatgctctaaatattagtatttttattaatcctttgattatcatcttctcgtacgcgaatgattccatgatcaagagtgatttgagaacatcctccggagtattaatgggcttagtaaacagtacatcgttgcaataataaaagttatccaagttaaaggatattatgcattcgtttaaagatatcacctcatctgacggagacaattttttggtaggttttagagactttgaagctacttgtttaacaaagttattcatcgtcgtttactattctatttaattttgtagttaatttatcacatatcacattaattgactttttggtccacttttccatacgtttatattcttttaatcctgcgttatccgtttccgttatatccagtgatagatcgtgcaggttaaatagaatgctcttaaataatgtcattttcttatccgctaaaaatttaaagaatgtataaacctttttcagagatttgaaactcttaggtggtgtcctagtacacaatatcataaacaaactaataaacattccacattcagattccaacagctgattaacttctacattaatacagcctattttcgctccaaatgtacattcgaaaaatctgaataaaacatcgatgtcacaatttgtattatccaatacagaatgtctgtgattcgtgttaaaaccatcggagaaggaatagaaataaaaattattatagtggtggaattcagttggaatattgcctccggagtcataaaaggatactaaacattgttttttatcataaattacacatttccaatgagacaaataacaaaatccaaacattacaaatctagaggtagaacttttaattttgtctttaagtatatacgataagatatgtttattcataaacgcgtcaaatttttcatgaatcgctaaggagtttaagaatctcatgtcaaattgtcctatataatccacttcggatccataagcaaactgagagactaagttcttaatacttcgattgctcatccaggctcctctctcaggctctattttcatcttgacgacctttggattttcaccagtatgtattcctttacgtgataaatcatcgattttcaaatccatttgtgagaagtctatcgccttagatactttttcccgtagtcgaggtttaaagaaatacgctaacggtatactagtaggtaactcaaagacatcatatatagaatggtaacgcgtctttaactcgtcggttaactctttcttttgatcgagttcgtcgctactattgggtctgctcaggtgccccgactctactagttccaacatcataccgataggaatacaagacactttgccggcggttgtagatttatcatatttttccactacatatccgttacaatttgttaaaaatttagatacatctatattgctacataatccagctagtgaatatatatgacataataaattggtaaatcctagttctggtattttactaattactaaatctgtatatctttccatttatcatggaaaagaatttaccagatatcttcttttttccaaactgcgttaatgtattctcttacaaatattcacaagatgaattcagtaatatgagtaaaacggaacgtgatagtttctcattggccgtgtttccagttataaaacatagatggcataacgcacacgttgtaaaacataaaggaatatacaaagttagtacagaagcacgtggaaaaaaagtatctcctccatcactaggaaaacccgcacacataaacctaaccacgaaacaatatatatacagtgaacacacaataagctttgaatgttatagttttctaaaatgtataacaaatacagaaatcaattcgttcgatgagtatatattaagaggactattagaagctggtaatagtttacagatattttccaattccgtaggtaaacgaacagatactataggtgtactagggaataagtatccatttagcaaaattccattggcctcattaactcctaaagcacaacgagagatatttttagcgtggatttctcatagacctgtagttttaactggaggaactggagtgggtaagacgtcacaggtacccaagttattgctttggtttaattatttatttggtggattctctactctagataaaatcactgactttcacgaaagaccagtcattctatctcttcctaggatagctttagttagattgcatagcaataccattttaaaatcattgggatttaaggtactagatggatctcctatttctttacggtacggatctataccggaagaattaataaacaaacaaccaaaaaaatatggaattgtattttctacccataagttatctctaacaaaactatttagttatggcactcttattatagacgaagttcatgagcatgatcaaataggagatattattatagcagtagcgagaaagcatcatacgaaaatagattctatgtttttaatgactgccacgttagaggatgacagggaacggctaaaagtatttttacctaatcccgcatttatacatattcctggagatacactgtttaaaattagcgaggtatttattcataataagataaatccatcttccagaatggcatacatagaagaagaaaagagaaatttagttactgctatacagatgtatactcctcctgatggatcatccggtatagtctttgtggcatccgttgcacagtgtcacgaatataaatcatatttagaaaaaagattaccgtatgatatgtatattattcatggtaaggttttagatatagacgaaatattagaaaaagtgtattcatcacctaatgtatcgataattatttctactccttatttggaatccagcgttactatacacaatgttacacacatttatgatatgggtagagtttttgtccccgctccttttggaggatcgcaacaatttatttctaaatctatgagagatcaacgaaaaggaagagtaggaagagttaatcctggtacatacgtctatttctatgatctgtcttatatgaagtctatacagcgaatagattcagaatttctacataattatatattgtacgctaataagtttaatctaacactccccgaagatttgtttataatccctacaaatttggatattctatggcgtacaaaggaatatatagactcgttcgatattagtacagaaacatggaataaattattatccaattattatatgaagatgatagagtatgctaaactttatgtactaagtcctattctcgctgaggagttggataattttgagaggacgggagaattaactagtattgtacaagaagccattttatctctaaatttacgaattaagattttaaattttaaacataaagatgatgatacgtatatacacttttgtaaaatattattcggtgtctataacggaacaaacgctactatatattatcatagacctctaacgggatatatgaatatgatttcagatactatatttgttcctgtagataataactaaaaattaaactctaatgaccacatctttttttagagatgaaaaattttccacatctccttttgtagacacgactaaacattttgcagaaaaaagtttattagtgtttagataatcgtatacttcatcagtgtagatagtaaatgtgaacagataaaaggtattcttgctcaatagattggtaaattccatagaatatattaatcctttcttcttgagatcccacatcatttcaaccagagacgttttatccaatgatttacctcgtactataccacatacaaaactagattttgcagtgacgtcgtacctggtattcctaccaaacaaaattttacttttagttcttttagaaaattctaaggtagaatctctatttgccaatatgtcatctatggaattaccactagcaaaaaatgatagaaatatatattgatacatcgcagctggttttgatctactatactttaaaaacgaatcagattccataattgcctgtatatcatcagctgaaaaactatgttttacacgtattccttcggcatttctttttaatgatatatcttgtttagacaatgataaagttatcatgtccatgagagacgcgtctccgtatcgtataaatatttcattagatgttagacgcttcattaggggtatacttctataaggtttcttaatcagtccatcattggttgcgtcaagaactactatcggatgttgttgggtatctctagtgttacacatggccttactaaagtttgggtaaataactatgatatctctattaattatagatgcatatatttcatttgtcaaggatattagtatcgacttgctatcgtcattaatacgtgtaatgtaatcatataaatcatgcgatagccaaggaaaatttaaatagatgttcatcatataatcgtcgctataattcatattaatacgttgacattgactaatttgtaatatagcctcgccacgaagaaagctctcgtattcagtttcatcgataaaggataccgttaaatataactggttgccgatagtctcatagtctattaagtggtaagtttcgtacaaatacagaatccctaaaatattatctaatgttggattaatctttaccataactgtataaaatggagacggagtcataactattttaccgtttgtacttactggaatagatgaaggaataatctccggacatgctggtaaagacccaaatgtctgtttgaagaaatccaatgttccaggtcctaatctcttaacaaaaattacgatattcgatcccgatatcctttgcattctatttaccagcatatcacgaactatattaagattatctatcatgtctattctcccaccgttatataaatcgcctccgctaagaaacgttagtatatccatacaatggaatacttcatttctaaaatagtattcgttttctaattctttaatgtgaaatcgtatactagaaagggaaaaattatctttgagttttccgttagaaaagaaccacgaaactaatgttctgattgcgtccgattccgttgctgaattaatggatttacaccaaaaactcatataacttctagatgtagaagcattcgctaaaaaattagtagaatcaaaggatataagtagatgttccaacaagtgagcaattcccaagatttcatctatatcattctcgaatccgaaattagaaattcccaagtagatatcctttttcatccgatcgttgatgaaaatacgaactttattcggtaagacaatcatttactaaggagtaaaataggaagtaatgttcgtatgtcgttatcatcgtataaattaaaggtgtgttttttaccattaagtgacattataattttaccaatattggaattataatataggtgtatttgcgcactcgcgacggttgatgcatcggtaaatatagctgtatctaatgttctagtcggtatttcatcatttcgctgtctaataatagcgttttctctatctgtttccattacagctgcctgaagtttattggtcggataatatgtaaaataataagaaatacatacgaataacaaaaataaaataagatataataaagatgccatttagagatctaattttgttcaacttgtccaaattcctacttacagaagatgaggaatcgttggagatagtgtcttccttatgtagaggatttgaaatatcttatgatgacttgataacttactttccagataggaaataccataaatatatttataaagtatttgaacatgtagatttatcggaggaattaagtatggaattccatgatacaactctgagagatttagtctatcttagattgtacaagtattccaagtgtatacggccgtgttataaattaggagataatctaaaaggcatagttgttataaaggacaggaatatttatattagggaagcaaatgatgacttgatagaatatctcctcaaggaatacactcctcagatttatacatattctaatgagcgagttcccatagctggttcaaaattaattctttgtggattttctcaagttacatttatggcgtatacaacgtcgcatataacaacaaataaaaaggtagatgttctcgtttccaaaaaatgtatagatgaactagtcgatccaataaattatcaaatacttcaaaatttatttgataaaggaagcggaacaataaacaaaatactcaggaagatattttattcggtaacaggtggccaaactccataggtagctttttctatttcggattttagaatttccaaattcaccagcgatttatcggttttggtgaaatccaaggatttattaatgtccacaaatgccatttgttttgtctgtggattgtatttgaaaatggaaacgatgtagttagatagatgcgctgcaaagtttcctattagggttccgcgctttacgtcacccagcatacttgaatcaccatcctttaaaaaaaatgataagatatcaacatggagtatatcatactcggattttaattcttctactgactcactgacattttcacaaatactacaatacggtttaccgaaaataatcaatacgttcttcatttatgggtatcaaaaacttaaaatcgttactgctggaaaataaatcactgacgatattagatgataatttatacaaagtatacaatggaatatttgtggatacaatgagtatttatatagccgtcgccaattgtgtcagaaacttagaagagttaactacggtattcataaaatacgtaaacggatgggtaaaaaagggagggcatgtaaccctttttatcgatagaggaagtataaaaattaaacaagacgttagagacaagagacgtaaatattctaaattaaccaaggacagaaaaatgttagaattagaaaagtgtacatccgaaatacaaaatgttaccggatttatggaagaagaaataaaggcaaaaatgcaattaaaaatcgataaacttacatttcaaatatatttatctgattctgataacataaaaatatcattgaatgagatactaacacatttcaacaataatgagaatgttacattattttattgtgatgaacgagacgcagaattcgttatgtgtctcgaggctaaaacacatttctctaccacaggagaatggccgttgataataagtaccgatcaggatactatgctatttgcatctgctgataatcatcctaagatgataaaaaacttaactcaactgtttaaatatgttccatctgcagaggataactatttagcaaaattaacggcgttagtgaatggatgtgatttctttcctggactctatggggcatctataacacccaacaacttaaacaaaatacaattgtttagtgattttacaatcgataatatagtcactagtttggcaattaaaaattattatagaaagactaactctaccgtagacgtgcgtaatattgttacgtttataaacgattacgctaatttagacgatgtctactcgtatgttcctccttgtcaatgcactgttcaagaatttatattttccgcattagatgaaaaatggaacaattttaaatcatcttatttagaaaccgttccgttaccctgtcaattaatgtacgcgttagaaccacgtaaggagattgatgtttcagaagttaaaactttatcatcttatatagatttcgaaaatactaaatcagatatcgatgttataaaatctatatcctcgatttttggatattctaacgaaaactgtaacactatagtgttcggcatctataaggataatttactactgagtataaatagttcattttactttaacgatagtctgttaataaccaatactaaaagtgataatataataaatataggttactagattaaaaatggtgttccaactcgtgtgctctacatgcggtaaagatatttctcacgaacgatataaattgattatacgaaaaaaatcattaaaggatgtactcgtcagtgtaaagaacgaatgttgtaggttaaaattatctacacaaatagaacctcaacgtaacttaacagtgcaacctctattggatataaactaatatggatccggttaattttatcaagacatatgcgcctagaggttctattatttttattaattataccatgtcattaacaagtcatttgaatccatcgatagaaaaacatgtgggtatttattatggtacgttattatcggaacacttggtagttgaatctacctatagaaaaggagttcgaatagtcccattggatagtttttttgaaggatatcttagtgcaaaagtatacatgttagagaatattcaagttatgaaaatagcagctaatacgtcattaactttattgggtattccgtatggatttggtcataatagaatgtattgttttaaattggtagctgaatgttataaaaatgccggtattgatacatcgtctaaacgaatattgggcaaagatatttttctgagccaaaacttcacagacgataatagatggataaagatatatgattctaataatttaacattttggcaaattgattaccttaaagggtgagttaatatgcataactactcctccgttgttttttccctcgttctttttcttaacgttgtttgccatcactctcataatgtaaagatattctaaaatggtaaacttttgcatatcggacgcagaaattggtataaatgttgtaattgtattatttcccgtcaatggactagtcacagctccatcagttttatatcctttagagtatttctcactcgtgtctaacattctagagcattccatgatctgtttatcgttgatattggccggaaagatagattttttattttttattatattactattggcaattgtagatataacttctggtaaatatttttctaccttttcaatctcttctattttcaagccggctatatattctgctatattgttgctagtatcaataccttttcttgctaagaagtcatatgtggtattcactatatcagttttaactggtagttccattagcctttccacttctgcagaataatcagaaattggttctttaccagaaaatccagctactataataggctcaccgatgatcattggcaaaatcctatattgtaccagattaatgagagcatatttcatttccaataattctgctagttcttgagacattgatttatttgatgaatctagttggttctctagatactctaccatttctgccgcatacaataacttgttagataaaatcagggttatcaaagtgtttagcgtggctagaatagtgggcttgcatgtattaaagaatgcggtagtatgagtaaaccgttttaacgaattatatagtctccagaaatctgtggcgttacatacatgagccgaatgacatcgaagattgtccaatatttttaatagctgctctttgtccattatttctatatttgactcgcaacaattgtaaataccattaatcactgattcctttttcgatgccggacaatagcacaattgtttagctttggactctatgtattcagaattaatagatatatctcttaatacagattgcactatacattttgaaactatgtcaaaaattgtagaacgacgctgttctgcagccatttaactttaaataatttacaaaaatttaaaatgagcatccgtataaaaatcgataaactgcgccaaattgtggcatatttttcagagttcagtgaagaagtgtctataaatgtagactcgacggatgagttaatgtatatttttgccgccttgggcggatctgtaaacatttgggccattatacctctcagtgcatcagtgttctaccgcggagccgaaaatattgtgtttaatcttccggtgtccaaggtaaaatcgtgtttgtgtagttttcacaatgatgccatcatagatatagaacctgatctgaaaaataatctagtaaaactttctagttatcatgtagtaagtgtcgattgtaacaaggaactgatgcctattaggacagatactactatttgtctaagtatagatcaaaagaaatcttatgtgtttaattttcacaagtatgaagaaaaatgttgtggtagaaccgtcattcatctagaatggttgttgggctttatcaagtgtattagtcagcatcagcatctggctattatgtttaaagatgacaatattattatgaagactcctggtaatactgatgcattttccagggaatattctatgactgaatgttctcaagaactacaaaagttttctttcaaaatagctatctcgtctctcaacaaactacgaggattcaaaaagagagtcaatgtttttgaaactagaatcgtaatggataatgacgataacattttaggaatgttgttttcggatagagttcaatcctttaagatcaacatctttatggcgtttttagattaatactttcaatgagataaatatgggtggcggagtaagtgttgagctccctaaacgggatccgcctccgggagtacccactgatgagatgttattaaacgtggataaaatgcatgacgtgatagctcccgctaagcttttagaatatgtgcatataggaccactagcaaaagataaagaggataaagtaaagaaaagatatccagagtttagattagtcaacacaggacccggtggtctttcggcattgttaagacaatcgtataatggaaccgcacccaattgctgtcgcacttttaatcgtactcattattggaaaaaggatggaaagatatcagataagtatgaagagggtgcagtattagaatcgtgttggccagacgttcacgacactggaaaatgcgatgttgatttattcgactggtgtcagggggatacgttcgatagaaacatatgccatcagtggatcggttcagcctttaataggagtgatagaactgtagagggtcaacaatcgttaataaatctgtataataagatgcaaacattatgtagtaaagatgctagtgtaccaatatgtgaatcatttttgcatcatttacgcgcacacaatacagaagatagcaaagagatgatcgattatattctaagacaacagtctgcggactttaaacagaaatatatgagatgtagttatcccactagagataagttagaagagtcattaaaatatgcggaacctcgagaatgttgggatccagagtgttcgaatgccaatgttaatttcttgctaacacgtaattataataatttaggactttgcaatattgtacgatgtaataccagcgtgaacaacttacagatggataaaacttcctcattaagattgtcatgtggattaagcaatagtgatagattttctactgttcccgtcaatagagcaaaagtagttcaacataatattaaacattcgttcgacctaaaattgcatttgatcagtttattatctctcttggtaatatggatactaattgtagctatttaaatgggtgccgcggcaagcatacagacgacggtgaatacactcagcgaacgtatctcgtctaaattagaacaagaagcgaacgctagtgctcaaacaaaatgtgatatagaaatcggaaatttttatatccgacaaaaccatggatgtaacctcactgttaaaaatatgtgctctgcggacgcggatgctcagttggatgctgtgttatcagccgctacagaaacatatagtggattaacaccggaacaaaaagcatacgtgccagctatgtttactgctgcgttaaacattcagacgagtgtaaacactgttgttagagattttgaaaattatgtgaaacagacttgtaattctagcgcggtcgtcgataacaaattaaagatacaaaacgtaatcatagatgaatgttacggagccccaggatctccaacaaatttggaatttattaatacaggatctagcaaaggaaattgtgccattaaagcgttgatgcaattgacgactaaggccactactcaaatagcacctagacaagttgctggtacaggagttcagttttatatgattgttatcggtgttataatattggcagcgttgtttatgtactatgccaagcgtatgttgttcacatccaccaatgataaaatcaaacttattttagccaataaggaaaacgtccattggactacttacatggacacattctttagaacttctccgatggttattgctaccacggatatgcaaaactgaaaatatattgataatattttaatagattaacatggaagttatcgctgatcgtctagacgatatagtgaaacaaaatatagcggatgaaaaatttgtagattttgttatacacggtctagagcatcaatgtcctgctatacttcgaccattaattaggttgtttattgatatactattatttgttatagtaatttatatttttacggtacgtctagtaagtagaaattatcaaatgttgttggtggtgctagtcatcacattaactattttttattactttatactataatagtactagactgacttctaacaaacatctcacccgccataaataaatgcttgatattaaagtcttctatttctaacactattccatctgtggaaaataatactctgacattatcgctaattgacacatcggtgagtgatatgcctataaagtaataatcttctttgggcacatataccagtgtaccaggttctaacaacctatttactggtgctcctgtagcatactttttctttaccttgagaatatccatcgtttgcttggtcaatagcgatatgtgattttttatcaaccactcgaaaaagtaattggagtgttcatatcctctacgggctattgtctcatggccgtgtatgaaatttaagtaacacgactgtggtagatttgttctatagagccggttgccgcaaatagatagaactaccaatatgtctgtacaaatgttaaacattaattgattaacagaaaaaacaatgttcgttctgggaatagaaaccagattaaaacaaaattcgttagaatatatgccacgtttatacatggaatataaaataactacagtttgaaaaataacagtatcatttaaacatttaacttgcggggttaatttcacaactttactgtttttgaactgttcaaaatatagcatcgatccatgagaaatacgtttagccgcctttaatagaggaaatcccaccgcctttctggatctcaccaacgacgatagttctgaccagcaactcatttcttcatcatccacctgttttaacatataataggcaggagatagatatccgtcattgcaatattccttctcgtaggcacacaatctaatattgataaaatctccattctcttctctgcatttattatcttgtttcggtggctgattaggctgtagtcttggtttaggctttggtatatcgttgttgaatctattttggtcattaaatctttcatttcttcctggtatatttctatcacctcgtttggttggatttttgtctatattatcgtttgtaacatcggtacgggtattcatttatcacaaaaaaaacttctctaaatgagtctactgctagaaaacctcatcgaagaagataccatattttttgcaggaagtatatctgagtatgatgatttacaaatggttattgccggcgcaaaatccaaatttccaagatctatgctttctatttttaatatagtacctagaacgatgtcaaaatatgagttggagttgattcataacgaaaatatcacaggagcaatgtttaccacaatgtataatataagaaacaatttgggtctaggcgatgataaactaactattgaagccattgaaaactatttcttggatcctaacaatgaggttatgcctcttatcattaataatacggatatgactgccgtcattcctaaaaaaagtggtaggagaaagaataagaacatggttattttccgtcaaggatcatcacctatcttgtgtattttcgaaactcgtaaaaagattaatatttataaagaaaatatggaatccgcgtcgactgagtatacacctatcggagacaacaaggctttgatatctaaatatgcgggaattaatgtcctgaatgtgtattctccttccacatccatgagattgaatgccatttacggattcaccaataaaaataaactagagaaacttagtactaataaggaactagaatcgtatagttctagccctcttcaagaacccattaggttaaatgattttctgggactattggaatgtgttaaaaagaatattcctctaacagatattccgacaaaggattgattactataaatggagaatgttcctaatgtatactttaatcctgtgtttatagagcccacgtttaaacattctttattaagtgtttataaacacagattaatagttttatttgaagtattcgttgtattcattctaatatatgtattttttagatctgaattaaatatgttcttcatgcctaaacgaaaaatacccgatcctattgatagattacgacgtgctaatctagcgtgtgaagacgataaattaatgatctatggattaccatggatgacaactcaaacatctgcgttatcaataaatagtaaaccgatagtgtataaagattgtgcaaagcttttgcgatcaataaatggatcacaaccagtatctcttaacgatgttcttcgcagatgatgattcattttttaagtatttggctagtcaagatgatgaatcttcattatctgatatattgcaaatcactcaatatctagactttctgttattattattgatccaatcaaaaaataaattagaagccgtgggtcattgttatgaatctctttcagaggaatacagacaattgacaaaattcacagactctcaagattttaaaaaactgtttaacaaggtccctattgttacagatggaagggtcaaacttaataaaggatatttgttcgactttgtgattagtttgatgcgattcaaaaaagaatcagctctagctaccaccgcaatagatcctgttagatacatagatcctcgtcgcgatatcgcattttctaacgtgatggatatattaaagtcgaataaagtgaacaataattaattctttattgtcatcaaaaattgaaattttattttttttttttggaatataaatatatctagcgctaccggtcgccaccatggtgagcaagggcgaggagctgttcaccggggtggtgcccatcctggtcgagctggacggcgacgtaaacggccacaagttcagcgtgtccggcgagggcgagggcgatgccacctacggcaagctgaccctgaagttcatctgcaccaccggcaagctgcccgtgccctggcccaccctcgtgaccaccttcggctacggcctgcagtgcttcgcccgctaccccgaccacatgaagcagcacgacttcttcaagtccgccatgcccgaaggctacgtccaggagcgcaccatcttcttcaaggacgacggcaactacaagacccgcgccgaggtgaagttcgagggcgacaccctggtgaaccgcatcgagctgaagggcatcgacttcaaggaggacggcaacatcctggggcacaagctggagtacaactacaacagccacaacgtctatatcatggccgacaagcagaagaacggcatcaaggtgaacttcaagatccgccacaacatcgaggacggcagcgtgcagctcgccgaccactaccagcagaacacccccatcggcgacggccccgtgctgctgcccgacaaccactacctgagctaccagtccgccctgagcaaagaccccaacgagaagcgcgatcacatggtcctgctggagttcgtgaccgccgccgggatcactctcggcatggacgagctgtacaagtccggactcaggtctagacggattcagatgacacttcacatgagcgaaaaatacatcgtcacctgggacatgttgcagatccatgcacgtaaactcgcaagccgactgatgccttctgaacaatggaaaggcattattgccgtaagccgtggcggtctggtaccgggtgcgttactggcgcgtgaactgggtattcgtcatgtcgataccgtttgtatttccagctacgatcacgacaaccagcgcgagcttaaagtgctgaaacgcgcagaaggcgatggcgaaggcttcatcgttattgatgacctggtggataccggtggtactgcggttgcgattcgtgaaatgtatccaaaagcgcactttgtcaccatcttcgcaaaaccggctggtcgtccgctggttgatgactatgttgttgatatcccgcaagatacctggattgaacagccgtgggatatgggcgtcgtattcgtcccgccaatctccggtcgctaatgatagtattatattttttatctaaaaaactaaaaataaacattgattaaattttaatataatacttaaaaatggatgttgtgtcgttagataaaccgtttatgtattttgaggaaattgataatgagttagattacgaaccagaaagtgcaaatgaggtcgcaaaaaaactgccgtatcaaggacagttaaaactattactaggagaattattttttcttagtaagttacagcgacacggtatattagatggtgccaccgtagtgtatataggatctgctcccggtacacatatacgttatttgagagatcatttctataatttaggagtgatcatcaaatggatgctaattgacggccgccatcatgatcctattttaaatggattgcgtgatgtgactctagtgactcggttcgttgatgaggaatatctacgatccatcaaaaaacaactgcatccttctaagattattttaatttctgatgtgagatccaaacgaggaggaaatgaacctagtacggcggatttactaagtaattacgctctacaaaatgtcatgattagtattttaaaccccgtggcatctagtcttaaatggagatgcccgtttccagatcaatggatcaaggacttttatatcccacacggtaataaaatgttacaaccttttgctccttcatattcagctgaaatgagattattaagtatttataccggtgagaacatgagactgactcgagttaccaaattagacgctgtaaattatgaaaaaaagatgtactaccttaataagatcgtccgtaacaaagtagttgttaactttgattatcctaatcaggaatatgactattttcacatgtactttatgctgaggaccgtgtactgcaataaaacatttcctactactaaagcaaaggtactatttctacaacaatctatatttcgtttcttaaatattccaacaacatcaactgaaaaagttagtcatgaaccaatacaacgtaaagtatctagcaaagattttatgtctaaaaacagaaatagcaagagatccgtacgcagtaataaatagaaatagggataacagggtaat

SEQ ID NO: 29 - DNA, 26077 bp, Vaccinia virus
tagggataacagggtaattattatattttttatctaaaaaactaaaaataaacattgattaaattttaatataatacttaaaaatggatgttgtgtcgttagataaaccgtttatgtattttgaggaaattgataatgagttagattacgaaccagaaagtgcaaatgaggtcgcaaaaaaactgccgtatcaaggacagttaaaactattactaggagaattattttttcttagtaagttacagcgacacggtatattagatggtgccaccgtagtgtatataggatctgctcccggtacacatatacgttatttgagagatcatttctataatttaggagtgatcatcaaatggatgctaattgacggccgccatcatgatcctattttaaatggattgcgtgatgtgactctagtgactcggttcgttgatgaggaatatctacgatccatcaaaaaacaactgcatccttctaagattattttaatttctgatgtgagatccaaacgaggaggaaatgaacctagtacggcggatttactaagtaattacgctctacaaaatgtcatgattagtattttaaaccccgtggcatctagtcttaaatggagatgcccgtttccagatcaatggatcaaggacttttatatcccacacggtaataaaatgttacaaccttttgctccttcatattcagctgaaatgagattattaagtatttataccggtgagaacatgagactgactcgagttaccaaattagacgctgtaaattatgaaaaaaagatgtactaccttaataagatcgtccgtaacaaagtagttgttaactttgattatcctaatcaggaatatgactattttcacatgtactttatgctgaggaccgtgtactgcaataaaacatttcctactactaaagcaaaggtactatttctacaacaatctatatttcgtttcttaaatattccaacaacatcaactgaaaaagttagtcatgaaccaatacaacgtaaagtatctagcaaagattttatgtctaaaaacagaaatagcaagagatccgtacgcagtaataaatagaaacgtactactgagatatactaccgatatagagtataatgatttagttactttaataaccgttagacataaaattgattctatgaaaactgtgtttcaggtatttaacgaatcatccataaattatactccggttgatgatgattatggagaaccaatcattataacatcgtatcttcaaaaaggtcataacaagtttcctgtaaattttctatacatagatgtggtaatatctgacttatttcctagctttgttagactagatactacagaaactaatatagttaatagtgtactacaaacaggtgatggtaaaaagactcttcgtcttcccaaaatgttagagacggaaatagttgtcaagattctctatcgccctaatataccattaaaaattgttagatttttccgcaataacatggtaactggagtagagatagccgatagatctgttatttcagtcgctgattaatcaattagtagagatgagataagaacattataataatcaataatattatcttatatcttgtttagaaaaatgctaatattaaaatagctaacgctagtaatccaatcggaagccatttgatatctataatagggtatctaatttcctgattcagatagcggacagctatattctcggtagctactcgtttggaatcacaaacattatttacatctaatttactatctgtaatggaaacgtttcccaatgaaatggtacaatccgatacattgcattttgttatatttttttttaaagaggctggtaacaacgcatcgcttcgtttacatggctcgtaccaacaataatagggtaatcttgtatctattcctatccgtactatgcttttatcaggataaatacatttacatcgtatatcgtctttgttagcatcacagaatgcataaatttgttcgtccgtcatgataaaaatttaaagtgtaaatataactattatttttatagttgtaataaaaagggaaatttgattgtatactttcggttctttaaaagaaactgacttgataaaaatggctgtaatctctaaggttacgtatagtctatatgatcaaaaagagattaatgctacagatattatcattagtcatgttaaaaatgacgacgatatcggtaccgttaaagatggtagactaggtgctatggatggggcattatgtaagacttgtgggaaaacggaattggaatgtttcggtcactggggtaaagtaagtatttataaaactcatatagttaagcctgaatttatttcagaaattattcgtttactgaatcatatatgtattcactgcggattattgcgttcacgagaaccgtattccgacgatattaacctaaaagagttatcgggacacgctcttaggagattaaaggataaaatattatccaagaaaaagtcatgttggaacagtgaatgtatgcaaccgtatcaaaaaattactttttcaaagaaaaaggtttgtttcgtcaacaagttggatgatattaacgttcctaattctctcatctatcaaaagttaatttctattcatgaaaagttttggccattattagaaattcatcaatatccagctaacttattttatacagactactttcccatccctccgttgattattagaccggctattagtttttggatagatagtatacccaaagaaaccaatgaattaacttacttattaggtatgatcgttaagaattgtaacttgaatgctgatgaacaggttatccagaaggcggtaatagaatacgatgatattaaaattatttctaataacactaccagtattaatttatcatatatcacatccggcaaaaataatatgattagaagttatatcgtcgcccggcgaaaagatcagaccgctagatctgtaattggtcccagtacatctatcaccgttaatgaggtaggaatgcccgcatatattagaaatacacttacagaaaagatatttgttaatgcctttacagtggataaagttaaacaactattagcatcaaaccaagttaaattttactttaataaacgattaaaccaattaacaagaatacgccaaggaaagtttattaaaaataaaatacatttattgcctggtgattgggtagaagtagctgttcaagaatatacaagtattatttttggaagacagccgtctctacatagatacaacgtcatcgcttcatctatcagagctaccgaaggagatactatcaaaatatctcccggaattgccaactctcaaaatgctgatttcgacggggatgaggaatggatgatattagaacaaaatcctaaagctgtaattgaacaaagtattcttatgtatccgacgacgttactcaaacacgatattcatggagcccctgtttatggatctattcaagatgaaatcgtagcagcgtattcattgtttaggatacaagatctttgtttagatgaagtattgaacatcttggggaaatatggaagagagttcgatcctaaaggtaaatgtaaattcagcggtaaagatatctatacttacttgataggtgaaaagattaattatccgggactcttaaaggatggtgaaattattgcaaacgacgtagatagtaattttgttgtggctatgaggcatctgtcattggctggactcttatccgatcataagtcgaacgtggaaggtatcaactttattatcaagtcatcttatgtttttaagagatatctatctatttacggttttggggtgacattcaaagatctcagaccaaattcgacgttcactaataaattggaggccatcaacgtagaaaaaatagaacttatcaaagaagcatacgccaaatatctcaacgatgtaagagacgggaaaatagttccattatctaaagctttagaggcggactatgtggaatccatgttatccaacttgacaaatcttaatatccgagagatagaagaacatatgagacaaacgctgatagatgatccagataataacctcctgaaaatggccaaagcgggttataaagtaaatcccacagaactaatgtatattctaggtacttatggacaacagaggattgatggtgaaccagcagagactcgagtattgggtagagttttaccttactatcttccagactctaaggatccagaaggaagaggttatattcttaattctttaacaaaaggattaacaggttctcaatattacttttcgatgctggttgcaagatctcaatctactgatatcgtctgtgaaacatcacgtaccggaacactggctagaaaaatcattaaaaagatggaggatatggtggtcgacggatacggacaagtagttataggtaatacgctcatcaagtacgccgccaattataccaaaattctaggctcagtatgtaaacctgtagatcttatctatccagatgagtccatgacttggtatttggaaattagtgctctgtggaataaaataaaacagggattcgtttactctcagaaacagaaacttgcaaaaaagacattggcgccgtttaatttcctagtattcgtcaaacccaccactgaggataatgctattaaggttaaggatctgtacgatatgattcataacgtcattgatgatgtgagagagaaatacttctttacggtatctaatatagattttatggagtatatattcttgacgcatcttaatccttctagaattagaattacaaaagaaacggctatcactatctttgaaaagttctatgaaaaactcaattatactctaggtggtggaactcctattggaattatttctgcacaggtattgtctgagaagtttacacaacaagccctgtccagttttcacactactgaaaaaagtggtgccgtcaaacaaaaacttggtttcaacgagtttaataacttgactaatttgagtaagaataagaccgaaattatcactctggtatccgatgatatctctaaacttcaatctgttaagattaatttcgaatttgtatgtttgggagaattaaatccaaacatcactcttcgaaaagaaacagataaatatgtagtagatataatagttaatagattatacatcaagagagcagaaataaccgaattagttgtcgaatatatgattgaacgatttatctcctttagcgtcattgtaaaggaatggggtatggagacattcattgaggacgaggataatattagatttactgtctatctaaatttcgttgaaccagaggaattgaatcttagtaagtttatgatggttcttccgggggcagccaacaagggaaagattagtaaattcaagattcctatctctgactatacgggatatgacgacttcaatcaaacaaaaaagctcaataagatgactgtagaactcatgaatctaaaagaattgggttctttcgatttggaaaacgtcaacgtgtatcctggagtatggaatacatacgatatcttcggtatcgaggccgctcgtgaatacttgtgcgaagccatgttaaacacctatggagaagggttcgattatctgtatcagccttgtgatcttctcgctagtttactatgtgctagttacgaaccagaatcagtgaataaattcaagttcggcgcagctagtactcttaagagagctacgttcggagacaataaagcattgttaaacgcggctcttcataaaaagtcagaacctattaacgataatagtagctgccacttttttagcaaggtccctaatataggaactggatattacaaatactttatcgacttgggtcttctcatgagaatggaaaggaaactatctgataagatatcttctcaaaagatcaaggaaatggaagaaacagaagacttttaattcttatcaataacatatttttctatgatctgtcttttaaacgatggattttccacaaatgcgcctctcaagtccctcatagaatgatacacgtataaaaaatatagcataggcaatgactccttatttttagacattagatatgccaaaatcatagccccgcttctatttactcccgcagcacaatgaaccaacacgggctcgtttcgttgatcacatttagataaaaaggcggttacgtcgtcaaaatatttactaatatcggtagttgtatcatctaccaacggtatatgaataatattaatattagagttaggtaatgtatatttatccatcgtcaaatttaaaacatatttgaacttaacttcagatgatggtgcatccatagcatttttataatttcccaaatacacattattggttacccttgtcattatagtgggagatttggctctgtgcatatctccagttgaacgtagtagtaagtatttatacaaacttttcttatccatttataacgtacaaatggataaaactactttatcggtaaacgcgtgtaatttagaatacgttagagaaaaggctatagtaggcgtacaagcagccaaaacatcaacacttatattctttgttattatattggcaattagtgcgctattactctggtttcagacgtctgataatccagtctttaatgaattaacgagatatatgcgaattaaaaatacggttaacgattggaaatcattaacggatagcaaaacaaaattagaaagtgatagaggtagacttctagccgctggtaaggatgatatattcgaattcaaatgtgtggatttcggcgcctattttatagctatgcgattggataagaaaacatatctgccgcaagctattaggcgaggtactggagacgcgtggatggttaaaaaggcggcaaaggtcgatccatctgctcaacaattttgtcagtatttgataaaacacaagtctaataatgttattacttgtggtaatgagatgttaaatgaattaggttatagcggttattttatgtcaccgcattggtgttccgattttagtaatatggaatagtgttagataaatgcggtaacgaatgttcctgtaaggaaccataacagcttagatttaacgttaaagatgagcataaacataataaacaaaattacaatcaaacctataacattaatatcaaacaatccaaaaaatgaaatcagtggagtagtaaacgcgtacataactcctggataacgtttagcagctgccgttcctattctagaccaaaaattcggtttcatgttttcgaagcggtgttctgcaacaagtcggggatcgtgttctacatatttggcggcgttatccagtatctgcctattgatcttcatttcgttttcgattctggctatttcaaaataaaatcccgatgatagacctccagactttataatttcatctacgatgttcagcgccgtagtaactctaataatataggctgataagctaacatcataccctcctgtatatgtgaatatggcatgatttttgtccattacaagctcggttttaactttattgcctgtaataatttctctcatctgtaggatatctatttttttgtcatgcattgccttcaagacgggacgaagaaacgtaatatcctcaataacgttatcgttttctacaataactacatattctacctttttattttctaactcggtaaaaaaattagaatcccatagggctaaatgtctagcgatatttcttttcgtttcctctgtacacatagtgttacaaaaccctgaaaagaagtgagtatacttgtcatcatttctaatgtttcctccagtccactgtataaacgcataatccttgtaatgatctggatcatccttgactaccacaacatttcttttttctggcataacttcgttgtcctttacatcatcgaacttctgatcattaatatgctcatgaacattaggaaatgtttctgatggaggtctatcaataactggcacaacaataacaggagttttcaccgccgccatttagttattgaaattaatcatatacaactctttaatacgagttatattttcgtctatccattgtttcacatttacatatttcgacaaaaagatataaaatgcgtattccaatgcttctctgtttaatgaattactaaaatatacaaacacgtcactgtctggcaataaatgatatcttagaatattgtaacaatttattttgtattgcacatgttcgtgatctatgagttcttcttcgaatggcataggatctccgaatctgaaaacgtataaataggagttagaataataatatttgagagtattggtaatatataaactctttagcggtataattagtttttttctctcaatttctatttttagatgtgatggaaaaatgactaattttgtagcattagtatcatgaactctaatcaaaatcttaatatcttcgtcacacgttagctctttgaagtttttaagagatgcatcagttggttctacagatggagtaggtgcaacaattttttgttctacacatgtatgtactggagccattgttttaactataatggtgcttgtatcgaaaaactttaatgcagatagcggaagctcttcgccgcgactttctacatcgtaattgggttctaacgccgatctctgaatggatactagttttctaagttctaatgtgattctctgaaaatgtaaatccaattcctccggcattatagatgtgtatacatcggtaaataaaactatagtatccaacgatcccttctcgcaaattctagtcttaaccaaaaaatcgtatataaccacggagatggcgtatttaagagtggattcttctaccgttttgttcttggatgtcatataggaaactataaagtccgcactactgttaagaatgattactaacgcaactatatagttcaaattaagcattttggaaacataaaataactctgtagacgatacttgactttcgaataagtttgcagacaaacgaagaaagaacagacctctcttaatttcagaagaaaactttttttcgtattcctgacgtctagagtttatatcaataagaaagttaagaattagtcggttaatgttgtatttcattacccaagtttgagatttcataatattatcaaaagacatgataatattaaagataaagcgctgactatgaacgaaatagctatatggttcgctcaagaatatagtcttgttaaacgtggaaacgataactgtatttttaatcacgtcagcggcatctaaattaaatataggtatatttattccacacactctacaatatgccacaccatcttcataataaataaattcgttagcaaaattattaattttagtgaaatagttagcgtcaactttcatagcttccttcaatctaatttgatgctcacacggtgcgaattccactctaacatcccttttccatgcctcaggttcatcgatctctataatatctagttttttgcgtttcacaaacacaggctcgtctctcgcgatgagatctgtatagtaactatgtaaatgataactagatagaaagatgtagctatatagatgacgatcctttaagagaggtataataactttaccccaatcagatagactgttgttatggtcttcggaaaaagaatttttataaatttttccagtattttccaaatatacgtacttaacatctaaaaaatccttaatgataataggaatggataatccgtctattttataaagaaatacatatcgcacattatacttttttttggaaatgggaataccgatgtgtctacataaatatgcaaagtctaaatattttttagagaatcttagttggtccaaattcttttccaagtacggtaatagatttttcatattgaacggtatcttcttaatctctggttctagttccgcattaaatgatgaaactaagtcactatttttataactaacgattacatcacctctaacatcatcatttaccagaatactgatcttcttttgtcgtaaatacatgtctaatgtgttaaaaaaaagatcatacaagttatacgtcatttcatctgtggtattcttgtcattgaaggataaactcgtactaatctcttctttaacagcctgttcaaatttatatcctatatacgaaaaaatagcaaccagtgtttgatcatccgcgtcaatattctgttctatcgtagtgtataacaatcgtatatcttcttctgtgatagtcgatacgttataaaggttgataacgaaaatatttttatttcgtgaaataaagtcatcgtaggattttggacttatattcgcgtctagtagatatgcttttatttttggaatgatctcaattagaatagtctctttagagtccatttaaagttacaaacaactaggaaattggtttatgatgtataatttttttagtttttatagattctttattctatacttaaaaaatgaaaataaatacaaaggttcttgagggttgtgttaaattgaaagcgagaaataatcataaattatttcattatcgcgatatccgttaagtttgtatcgtaatggcgtggtcaattacaaataaagcggatactagtagcttcacaaagatggctgaaatcagagctcatctaaaaaatagcgctgaaaataaagataaaaacgaggatattttcccggaagatgtaataattccatctactaagcccaaaaccaaacgagccactactcctcgtaaaccagcggctactaaaagatcaaccaaaaaggaggaagtggaagaagaagtagttatagaggaatatcatcaaacaactgaaaaaaattctccatctcctggagtcggcgacattgtagaaagcgtggctgctgtagagctcgatgatagcgacggggatgatgaacctatggtacaagttgaagctggtaaagtaaatcatagtgctagaagcgatctttctgacctaaaggtggctaccgacaatatcgttaaagatcttaagaaaattattactagaatctctgcagtatcgacggttctagaggatgttcaagcagctggtatctctagacaatttacttctatgactaaagctattacaacactatctgatctagtcaccgagggaaaatctaaagttgttcgtaaaaaagttaaaacttgtaagaagtaaatgcgtgcacttttttataaagatggtaaactctttaccgataataattttttaaatcctgtattagatgataatccagcgtatgaggttttgcaacatgttaaaattcctactcatttaacagatgtagtagtatatgaacaaacgtgggaagaggcattaactagattaatttttgtgggaagcgattcaaaaggacgtagacaatacttttacggaaaaatgcatgtacagaatcgcaacgctaaaagagatcgtatttttgttagagtatataacgttatgaaacgaattaattgttttataaacaaaaatataaagaaatcgtccacagattccaattatcagttggcggtttttatgttaatggaaactatgttttttattagatttggtaaaatgaaatatcttaaggagaatgaaacagtagggttattaacactaaaaaataaacacatagaaataagtcccgatgaaatagttatcaagtttgtaggaaaggacaaagtttcacatgaatttgttgttcataagtctaatagactatataaaccgctattgaaactgacggatgattctagtcccgaagaatttctgttcaacaaactaagtgaacgaaaggtatacgaatgtatcaaacagtttggtattagaatcaaggatctccgaacgtatggagtcaattatacgtttttatataatttttggacaaatgtaaagtccatatctcctcttccgtcaccaaaaaagttaatagcattaactatcaaacaaactgctgaagttgtaggtcatactccatcaatttcaaaaagagcttatatggcaacgactattttagaaatggtaaaggataaaaattttttagatgtagtatctaaaactacgttcgatgaattcctatctatagtcgtagatcacgttaaatcatctacggatggatgatatagatctttacacaaataattacaagaccgataaatggaaatggataagcgtataaaatctctcgcaatgaccgctttctttggggagctaagcacattagatattatggcattgataatgtctatatttaaacgccatccaaacaataccattttttcagtggataaggatggtcagtttatgattgatttcgaatacgataattataaggcttctcaatatttggatctgaccctcactccgatatttggagatgaatgcaagactcacgcatcgagtatagccgaacaattggcgtgtgcggatattattaaagaggatattagcgaatacatcaaaactactccccgtcttaaacgatttataaaaaaataccgcaatagatcagatactcgtatcagtcgagatacagaaaagcttaaaatagctctagctaaaggcatagattacgaatatataaaagacgcttgttaataagtaaatgaaaaaaaactagtcgtttataataaaacacgatatggatgccaacgtagtatcatcttctactattgcaacgtatatagacgctttagcgaagaatgcttcagaattagaacagaggtctaccgcatacgaaataaataatgaattggaactagtatttattaagccgccattaattactttgacaaatgtagtgaatatctctacgattcaggaatcgtttattcgatttaccgttactaataaggaaggtgtcaaaattagaactaagattccattatctaaggtacatggtctagatgtaaaaaatgtacagttagtagatgctatagataacatagtttgggaaaagaaatcattagtgacggaaaatcgtcttcacaaagaatgcttgttgagactatcgacagaggaacgtcatatatttttggattacaagaaatatggatcctctatccgactagaattagtcaatcttattcaagcaaaaacaaaaaactttacgatagactttaagctaaaatattttctaggatccggtgcccaatctaaaagttctttgttgcacgctattaatcatccaaagtcaaggcctaatacatctctggaaatagaattcacacctagagacaatgaaacagttccatatgatgaactaataaaggaattgacgactctctcgcgtcatatatttatggcttctccagagaatgtaattctttctccgcctattaacgcgcctataaaaacctttatgttgcctaaacaagatatagtaggtttggatctggaaaatctatatgccgtaactaagactgacggcattcctataactatcagagttacatcaaacgggttgtattgttattttacacatcttggttatattattagatatcctgttaagagaataatagattccgaagtagtagtctttggtgaggcagttaaggataagaactggactgtatatctcattaagctaatagagcccgtgaatgctatcagtgatagactagaagaaagtaagtatgttgaatctaaactagtggatatttgtgatcggatagtattcaagtcaaagaaatacgaaggtccgtttactacaactagtgaagtcgtcgatatgttatctacatatttaccaaagcaaccagaaggtgttattctgttctattcaaagggacctaaatctaacattgattttaaaattaaaaaggaaaatactatagaccaaactgcaaatgtagtatttaggtacatgtccagtgaaccaattatctttggagaatcgtctatctttgtagagtataagaaatttagcaacgataaaggctttcctaaagaatatggttctggtaagattgtgttatataacggcgttaattatctaaataatatctattgtttggaatatattaatacacataatgaagtgggtattaagtccgtggttgtacctattaagtttatagcagaattcttagttaatggagaaatacttaaacctagaattgataaaaccatgaaatatattaactcagaagattattatggaaatcaacataatatcatagtcgaacatttaagagatcaaagcatcaaaataggagatatctttaacgaggataaactatcggatgtgggacatcaatacgccaataatgataaatttagattaaatccagaagttagttattttacgaataaacgaactagaggaccgttgggaattttatcaaactacgtcaagactcttcttatttctatgtattgttccaaaacatttttagacgattccaacaaacgaaaggtattggcgattgattttggaaacggtgctgacctggaaaaatacttttatggagagattgcgttattggtagcgacggatccggatgctgatgctatagctagaggaaatgaaagatacaacaaattaaactctggaattaaaaccaagtactacaaatttgactacattcaggaaactattcgatccgatacatttgtctctagtgtcagagaagtattctattttggaaagtttaatatcatcgactggcagtttgctatccattattcttttcatccgagacattatgctaccgtcatgaataacttatccgaactaactgcttctggaggcaaggtattaatcactaccatggacggagacaaattatcaaaattaacagataaaaagacttttataattcataagaatttacctagtagcgaaaactatatgtctgtagaaaaaatagctgatgatagaatagtggtatataatccatcaacaatgtctactccaatgactgaatacattatcaaaaagaacgatatagtcagagtgtttaacgaatacggatttgttcttgtagataacgttgatttcgctacaattatagaacgaagtaaaaagtttattaatggcgcatctacaatggaagatagaccgtctacaaaaaactttttcgaactaaatagaggagccattaaatgtgaaggtttagatgtcgaagacttacttagttactatgttgtttatgtcttttctaagcggtaaataataatatggtatgggttctgatatccccgttctaaatgcattaaataattccaatagagcgatttttgttcctataggaccttccaactgtggatactctgtattgttaatagatatattaatacttttgtcgggtaacagaggttctacgtcttctaaaaataaaagtttgataacatctggcctgttcataaataaaaacttggcgattctatatatactcttattatcaaatctagccattgtcttatagatgtgagctactgtaggtgtaccatttgattttctttctaatactatatatttctctcgaagaagttcttgcacatcatctgggaataaaatactactgttgagtaaatcagttattttttttatatcgatattgatggacatttttatagttaaggataataagtatcccaaagtcgataacgacgataacgaagtatttatacttttaggaaatcacaatgactttatcagattaaaattaacaaaattaaaggagcatgtatttttttctgaatatattgtgactccagatacatatggatctttatgcgtcgaattaaatgggtctagttttcagcacggcggtagatatatagaggtggaggaatttatagatgctggaagacaagttagatggtgttctacatccaatcatatatctaaagatatacccgaagatatgcacactgataaatttgtcatttatgatatttatacgtttgattcgttcaagaataaacgattggtattcgtacaggtgcctccatcattaggagatgatagctatttgactaatccgttattgtctccgtattatcgtaattcagtagccagacaaatggtcaatgatatgatttttaatcaagattcatttttaaaatatttattagaacatctgattagaagccactatagagtttctaaacatataacaatagttagatacaaggataccgaagaattaaatctaacgagaatatgttataatagagataagtttaaggcgtttgtattcgcttggtttaacggcgtttcggaaaatgaaaaggtactagatacgtataaaaaggtatctaatttgatataatgaattcagtgactgtatcacacgcgccatatactattacttatcacgatgattgggaaccagtaatgagtcaattggtagagttttataacgaagtagccagttggctgctacgagacgagacgtcgcctattcctgataagttctttatacagttgaaacaaccgcttagaaataaacgagtatgtgtgtgcggtatagatccgtatccgaaagatggaactggtgtaccgttcgaatcaccaaattttacaaaaaaatcaattaaggagatagcttcatctatatctagattaaccggagtaattgattataaaggttataaccttaatataatagacggggttataccctggaattattacttaagttgtaaattaggagaaacaaaaagtcacgcgatctactgggataagatttccaagttactgctgcagcatataactaaacacgttagtgttctttattgtttgggtaaaacagatttctcgaatatacgggccaagttagaatccccggtaactaccatagtcggatatcatccagcggctagggaccgccaattcgagaaagatagatcatttgaaattatcaacgttttactggaattagacaacaaggcacctataaattgggctcaagggtttatttattaatgctttagtgaaattttaacttgtgttctaaatggatgcaactattagaggtaatgatgttatttttgtccttaagactataggtgtcccatcagcatgtagacaaaatgaagatccaagattcgtagaagcatttaaatgcgacgagttaaaaagatatattgagaataatccagaatgtacactattcgaaagtcttagggatgaggaagcatactctatagtcagaattttcatggatgtagatttagacgcgtgtctagacgaaatagattatttaacggctattcaagattttattatcgaggtgtcaaactgtgtagctagattcgcgtttacagaatgcggtgccattcatgaaaatgtaataaaatccatgagatctaatttttcattgactaagtctacaaatagagataaaacaagttttcatattatctttttagacacgtataccactatggatacattgatagctatgaaacgaacactattagaattaagtagatcatctgaaaatccactaacaagatcgatagacactgccgtatataggagaaaaacaactcttcgggttgtaggtactaggaaaaatccaaattgcgacactattcatgtaatgcaaccaccgcatgataatatagaagattacctattcacttacgtggatatgaacaacaatagttattacttttctctacaacgacgattggaggatttagttcctgataagttatgggaaccagggtttatttcattcgaagacgctataaaaagagtttcaaaaatattcattaattctataataaactttaatgatctcgatgaaaataattttacaacggtaccactggtcatagattacgtaacaccttgtgcattatgtaaaaaacgatcgcataaacatccgcatcaactatcgttggaaaatggtgctattagaatttacaaaactggtaatccacatagttgtaaagttaaaattgttccgttggatggtaataaactgtttaatattgcacaaagaattttagacactaactctgttttattaaccgaacgaggtgaccatatagtttggattaataattcatggaaatttaacagcgaagaacccttgataacaaaactaattttgtcaataagacatcaactacctaaggaatattcaagcgaattactctgtccaagaaaacgaaagactgtagaagctaacatacgagacatgttagtagattcagtggaaaccgatacctatccggataaacttccgtttaaaaatggtgtattggacctggtagacggaatgttttactctggagataatgctaaaaaatatacgtgtactgtatcaaccggatttaaatttgacgatacaaagttcgtcgaagacagtccagaaatggaagagttaatgaatatcattaacgatatccaaccattaacggatgaaaataagaaaaatagagagttgtacgaaaaaactttatctagttgtttatgcggtgctaccaaaggatgtttaacattcttttttggagaaactgcaactggaaagtcgacaaccaaacgtttgttaaagtctgctatcggtgacctgtttgttgagacgggtcaaacaattttaacagatgtattggataaaggacctaatccatttatcgctaacatgcatttgaaaagatctgtattctgtagcgaactacctgattttgcctgtagtggatcaaagaaaattagatctgacaatattaaaaagttgacagaaccttgtgtcattggaagaccgtgtttctccaataaaattaataatagaaaccatgcgacaatcattatcgatactaattacaaacctgtttttgataggatagataacgcattaatgagaagaattgccgtcgtgcgattcagaacacacttttctcaaccttctggtagagaggctgctgaaaataatgacgcgtacgataaagtcaaactattagacgaggggttagatggtaaaatacaaaataatagatatagattcgcatttctatacttgttggtgaaatggtacagaaaatatcatgttcctattatgaaactatatcctacaccggaagagattccggactttgcattctatctcaaaataggtactctgttggtatctagctctgtaaagcatattccattaatgacggacctctccaaaaagggatatatattgtacgataatgtggtcactcttccgttgactactttccaacagaaaatatccaagtattttaattctagactatttggacacgatatagagagcttcatcaatagacataagaaatttgccaatgttagtgatgaatatctgcaatatatattcatagaggatatttcatctccgtaaatatatgctcatatatttatagaagatatcacatatctaaatgaataccggaatcatagatttatttgataatcatgttgatagtataccaactatattacctcatcagttagctactctagattatctagttagaactatcatagatgagaacagaagcgtgttattgttccatattatgggatcaggtaaaacaataatcgctttgttgttcgccttggtagcttccagatttaaaaaggtttacattctagtgccgaacatcaacatcttaaaaattttcaattataatatgggtgtagctatgaacttgtttaatgacaaattcatagctgagaatatctttattcattccacaacaagtttttattctcttaattataacgataacgtcattaattataacggattatctcgctacaataactctatttttatcgttgatgaggcacataatatctttgggaataatactggagaacttatgaccgtgataaaaaataaaaacaagattccttttttactattgtctggatctcccattactaacacacctaatactctgggtcatattatagatttaatgtccgaagagacgatagattttggtgaaattattagtcgtggtaagaaagtaattcagacacttcttaacgaacgcggtgtgaatgtacttaaggatttgcttaaaggaagaatatcatattacgaaatgcctgataaagatctaccaacgataagatatcacggacgtaagtttctagatactagagtagtatattgtcacatgtctaaacttcaagagagagattatatgattactagacgacagctatgttatcatgaaatgtttgataaaaatatgtataacgtgtcaatggcagtattgggacaacttaatctgatgaataatttagatactttatttcaggaacaggataaggaattgtacccaaatctgaaaataaataatggcgtgttatacggagaagaattggtaacgttaaacattagttccaaatttaaatactttatcaatcggatacagacactcaacggaaaacattttatatacttttctaattctacatatggcggattggtaattaaatatatcatgctcagtaatggatattctgaatataatggttctcagggaactaatccacatatgataaacggcaaaccaaaaacatttgctatcgttactagtaaaatgaaatcgtctttagaggatctattagatgtgtataattctcctgaaaacgatgatggcagtcaattgatgtttttgttttcgtcaaacattatgtccgaatcctatactctgaaagaggtaaggcatatttggtttatgactatcccagatactttttctcaatacaaccaaattcttggacgatctattagaaaattctcttacgccgatatttctgaaccagttaatgtatatcttttagccgccgtatattccgatttcaatgacgaagtgacgtcattaaacgattacacacaggatgaattaattaatgttttaccatttgacatcaaaaagctgttatatctaaaatttaagacgaaagaaacgaatagaatatactctattcttcaagagatgtctgaaacgtattctcttccaccacatccatcaattgtaaaagttttattgggagaattggtcagacaatttttttataataattctcgtattaagtataacgactccaagttacttaaaatggttacatcagttataaaaaataaagaagacgctaggaattacatagatgatattgtaaacggtcacttctttgtatcgaataaagtatttgataaatctcttttatacaaatacgaaaacgatattattacagtaccgtttagactttcctacgaaccatttgtttggggagttaactttcgtaaagaatataacgtggtatcttctccataaaactgatgagatatataaagaaataaatgtcgagctttgttaccaatggataccttccagttacattggaacctcatgagctgacgttagacataaaaactaatattaggaatgccgtatataagacgtatctccatagagaaattagtggtaaaatggccaagaaaatagaaattcgtgaagacgtggaattacctctcggcgaaatagttaataattctgtagttataaacgttccgtgtgtaataacctacgcgtattatcacgttggggatatagtcagaggaacattaaacatcgaagatgaatcaaatgtaactattcaatgtggagatttaatctgtaaactaagtagagattcgggtactgtatcatttagcgattcaaagtactgcttttttcgaaatggtaatgcgtatgacaatggcagcgaagtcactgccgttctaatggaggctcaacaaggtatcgaatctagttttgtttttctcgcgaatatcgtcgactcataaaaaagagaatagcggtaagtataaacacgaatactatggcaataattgcgaatgttttattcccttcgatatatttttgataatatgaaaaacatgtctctctcaaatcggacaaccatctcataaaatagttctcgcgcgctggagaggtagttgctgctcgtataatctccccagaataatatacttctgtgtcatcgttcaatttatacggatttctatagttctctgttatataatgcggtttgccctcatgattagacaacgacaatagtgttctgaatttagatagttgatcagaatgaatgtttattggcgttggaaaaattatccatacagcgtctgcagagtggttgatagttgttcctagatatgtaaaataatccaacttactaggcagcaaattgtctagataaaatactgaatcaaacggtgcagacgtattggcggatctaatggaatccaattgattaactatcttttgaaaatatacatttttatgatccaatacttgtaagaatatagaaataatgataagtccatcatcgtgtttttttgcctcttcataagaactatattttttcttattccaatgaacaagattaatctctccagagtatttgtacacatctatcaagtgattggatccataatcgtcttcctttccccaatatatatgtagtgatgataacacatattcattggggagaaaccctccacttatatatcctcctttaaaattaatccttactagttttccagtgttctggatagtggttggtttcgactcattataatgtatgtctaacggcttcaatcgcgcgttagaaattgcttttttagtttctatattaataggagatagttgttgcggcatagtaaaaatgaaatgataactgtttaaaaatagctcttagtatgggaattacaatggatgaggaagtgatatttgaaactcctagagaattaatatctattaaacgaataaaagatattccaagatcaaaagacacgcatgtgtttgctgcgtgtataacaagtgacggatatccgttaataggagctagaagaacttcattcgcgttccaggcgatattatctcaacaaaattcagattctatctttagagtatccactaaactattacggtttatgtactacaatgaactaagagaaatctttagacggttgagaaaaggttctatcaacaatatcgatcctcactttgaagagttaatattattgggtggtaaactagataaaaaggaatctattaaagattgtttaagaagagaattaaaagaggaaagtgatgaacgtataacagtaaaagaatttggaaatgtaattctaaaacttacaacacgggataaattatttaataaagtatatataagttattgcatggcgtgttttattaatcaatcgttggaggatttatcgcatactagtatttacaatgtagaaattagaaagattaaatcattaaatgattgtattaacgacgataaatacgaatatctgtcttatatttataatatgctagttaatagtaaatgaacttttacagatctagtataattagtcagattattaagtataatagacgactagctaagtctattatttgcaaggatgactctcaaattattacactcacggcattcgttaaccaatgcctatggtgtcataaacgagtatccgtgtccgctattttattaactactgataacaaaatattagtatgtaacagacgagatagttttctctattctgaaataattagaactagaaacatgtttagaaagaaacgattatttctgaattattccaattatttgtccaaacaggaaagaagtatactatcgtcatttttttctctatatccagctactgctgataatgatagaatagacgctatttatccgggtggcatacccaaaaggggtgagaatgttccagagtgtttatccagggaaattaaagaagaagttaatatagacaattcttttgtattcatagacactcggttttttattcatggcatcatagaagataccattattaataaattttttgaggtaatcttctttgtcggaagaatatctctaacgagtgatcaaatcattgatacatttaaaagtaatcatgaaatcaaggatctaatatttttagatccgaattcaggtaatggactacaatacgaaattgcaaaatatgctctagatactgcaaaacttaaatgttacggccatagaggatgttattacgaatcattaaaaaaattaactgaggatgattgattagaaaatataaattaatttaccatcgtgtatttttataacgggattgtccggcatatcatgtagatagttaccgtctacatcgtatactcgaccatctacgcctttaaatcctctatttattgacattaatctattagaattggaataccaaatattagtaccctcaattagtttattggtaatattttttttagacgatagatcgatggctcttgaaaccaaggttttccaaccggactcattgtcgatcggtgagaagtctttttcattagcatgaatccattctaatgatgtatgtttaaacactctaaacaattggacaaattcttttgatttgctttgaatgatttcaaataggtcttcgtctacagtaggcataccattagataatctagccattataaagtgcacgtttacatatctacgttctggaggagtaagaacgtgactattgagacgaatggctcttcctactatctgacgaagagacgcctcgttccatgtcatatctaaaatgaagatatcattaattgagaaaaaactaataccctcgcctccactagaagagaatacgcatgttttaatgcattctccgttagtgtttgattcttggttaaactcagccaccgccttgattctagtatcttttgttctagatgagaactctatattagagataccaaagactttgaaatatagtaataagatttctattcctgactgattaacaaatggttcaaagactagacatttaccatgggatgctaatattcccaaacatacatctataaatttgacgcttttctcttttaattcagtaaatagagagatatcagccgcactagcatcccctttcaatagttctccctttttaaaggtatctaatgcggatttagaaaactctctatctcttaatgaatttttaaaatcattatatagtgttgctatctcttgcgcgtattcgcccggatcacgattttgtctttcaggaaagctatcgaacgtaaacgtagtagccatacgtctcagaattctaaatgatgatatacctgtttttatttcagcgagtttagccttttgataaatttcttcttgctttttcgacatattaacgtatcgcattaatactgttttcttagcgaatgatgcagacccttctacgtcatcaaaaatagaaaactcgttattaactatatacgaacatagtcctcctagtttggagactaattctttttcatcgactagacgtttattctcaaatagtgattggtgttgtaaggatcctggtcgtagtaagttaaccaacatggtgaattcttgcacactattgacgataggtgtagccgataaacaaatcatcttatggttttttaatgcgatggtcttggataaaaaattatatactgaacgagtaggacggatcttaccatcttctttgattaatgatttagaaatgaagttatgacattcatcaataatgacgcatattctactcttggaattaatagttttgatattagtaaaaaatttatttctaaaattttgatcatcgtaattaataaaaatacaatccttcgttatctctggagcgtatctgagtatagtgttcatccaaggatcttctatcaaagcctttttcaccaataagataatagcccaattcgtataaatatccttaagatgtttgagaatatatacagtagtcattgttttaccgacacccgtttcatggaacaataaaagagaatgcatactgtctaatcctaagaaaactcttgctacaaaatgttgataatccttgaggcgtactacgtctgttcccatcatttcaacaggcatattagtagttctgcgcaatgcataatcgatataggccgcgtgtgatttactcattagggataacagggtaat

SEQ ID NO: 30 - DNA, 24671 bp, Vaccinia virus
tagggataacagggtaatttagaaaatataaattaatttaccatcgtgtatttttataacgggattgtccggcatatcatgtagatagttaccgtctacatcgtatactcgaccatctacgcctttaaatcctctatttattgacattaatctattagaattggaataccaaatattagtaccctcaattagtttattggtaatattttttttagacgatagatcgatggctcttgaaaccaaggttttccaaccggactcattgtcgatcggtgagaagtctttttcattagcatgaatccattctaatgatgtatgtttaaacactctaaacaattggacaaattcttttgatttgctttgaatgatttcaaataggtcttcgtctacagtaggcataccattagataatctagccattataaagtgcacgtttacatatctacgttctggaggagtaagaacgtgactattgagacgaatggctcttcctactatctgacgaagagacgcctcgttccatgtcatatctaaaatgaagatatcattaattgagaaaaaactaataccctcgcctccactagaagagaatacgcatgttttaatgcattctccgttagtgtttgattcttggttaaactcagccaccgccttgattctagtatcttttgttctagatgagaactctatattagagataccaaagactttgaaatatagtaataagatttctattcctgactgattaacaaatggttcaaagactagacatttaccatgggatgctaatattcccaaacatacatctataaatttgacgcttttctcttttaattcagtaaatagagagatatcagccgcactagcatcccctttcaatagttctccctttttaaaggtatctaatgcggatttagaaaactctctatctcttaatgaatttttaaaatcattatatagtgttgctatctcttgcgcgtattcgcccggatcacgattttgtctttcaggaaagctatcgaacgtaaacgtagtagccatacgtctcagaattctaaatgatgatatacctgtttttatttcagcgagtttagccttttgataaatttcttcttgctttttcgacatattaacgtatcgcattaatactgttttcttagcgaatgatgcagacccttctacgtcatcaaaaatagaaaactcgttattaactatatacgaacatagtcctcctagtttggagactaattctttttcatcgactagacgtttattctcaaatagtgattggtgttgtaaggatcctggtcgtagtaagttaaccaacatggtgaattcttgcacactattgacgataggtgtagccgataaacaaatcatcttatggttttttaatgcgatggtcttggataaaaaattatatactgaacgagtaggacggatcttaccatcttctttgattaatgatttagaaatgaagttatgacattcatcaataatgacgcatattctactcttggaattaatagttttgatattagtaaaaaatttatttctaaaattttgatcatcgtaattaataaaaatacaatccttcgttatctctggagcgtatctgagtatagtgttcatccaaggatcttctatcaaagcctttttcaccaataagataatagcccaattcgtataaatatccttaagatgtttgagaatatatacagtagtcattgttttaccgacacccgtttcatggaacaataaaagagaatgcatactgtctaatcctaagaaaactcttgctacaaaatgttgataatccttgaggcgtactacgtctgttcccatcatttcaacaggcatattagtagttctgcgcaatgcataatcgatataggccgcgtgtgatttactcatttatgagtgataagtaataactatgttttaaaaatcacagcagtagtttaactagtcttctctgatgtttgttttcgatactttttgaatcagaagtcatactagaataaagcaacgagtgaacgtaatagagagcttcgtatactctattcgaaaactctaagaacttattaatgaattccgtatccactggattgtttaaaatactaaattgaacactgttcacatccttccaagaagaagacttagtgacggacttaacatgagacataaataaatccaaattttttttacaaacatcactagccaccataatggcgctatctttcaaccagctatcgcttacgcattttagcagtctaacatttttaaagagactacaatatattctcatagtatcgattacacctctaccgaataaagttggaagtttaataatacaatatttttcgtttacaaaatcaaataatggtcgaaacacgtcgaaggttaacatcttataatcgctaatgtatagattgttttcagtgagatgattattagatttaatagcatctcgttcacgtttgaacagtttattgcgtgcgctgaggtcggcaactacggcgtccgctttagtactcctcccataatactttacgctattaatctttaaaatttcatagactttatctagatcgctttctggtaacatgatatcatgtgtaaaaagttttaacatgtcggtcggcattctatttagatcattaactctagaaatctgaagaaagtaattagctccgtattccagactaggtaatgggcttttacctagagacagattaagttctggcaatgtttcataaaatggaagaaggacatgcgttccctcccggatattttttacaatttcatccatttacaactctatagtttgttttcattattattagttattatctcccataatcttggtaatacttaccccttgatcgtaagataccttatacaggtcattacatacaactaccaattgtttttgtacataatagattggatggttgacatccatggtggaataaactactcgaacagatagtttatctttccccctagatacattagccgtaatagttgtcggcctaaagaatatctttggtgtaaagttaaaagttagggttcttgttccattattgctttttgtcagtagttcattataaattctcgagatgggtccgttctctgaatatagaacatcatttccaaatctaacttctagtctagaaataatatcggtcttattcttaaaatctattcccttgatgaagggatcgttaatgaacaaatccttggcctttgattcggctgatctattatctccgttatagacgttacgttgactagtccaaagacttacaggaatagatgtatcgatgatgttgatactatgtgatatgtgagcaaagattgttctcttagtggcatcactatatgttccagtaatggcggaaaactttttagaaatgttatatataaaagaattttttcgtgttccaaacattagcagattagtatgaagataaacactcatattatcaggaacattatcaatttttacatacacatcagcatcttgaatagaaacgataccatcttctggaacctcaacaatctcggcagactccggataaccagtcggtgggccatcactaacaataactagatcatccaacaatctactcacatatgcatctatataatctttttcatcttgtgagtaccctggatacgaaataaatttattatccgtatttccataataaggtttagtataaacagagagcgatgttgccgcatgaacttcagttacagtcgccgttggttggtttatttgacctattactctcctaggtttctctataaacgatggtttaatttgtacattcttaaccatatatccaataaagctcaattcaggaacataaacaaattctttgttgaacgtttcaaagtcgaacgaagagtcacgaataacgatatcggatactggattgaaggttaccgttacggtaatttttgaatcggatagtttaagactgctgaatgtatcttccacatcaaacggagttttaatataaacgtatactgtagatggttctttaatagtgtcattaggagttaggccaatagaaatatcattaagttcactagaatatccagagtgtttcaaagcaattgtattattgatacaattattatataattcttcgccctcaatttcccaaataacaccgttacacgaagacaccgatacgtaattaatacatttatatccaacatatggtacgtaaccgaatcttcccatacctttaacttctggaagttccaaactcagaaccaaatgattaagcgcagtaatatactgatccctaatttcgaagctagcgatagcctgattgtctggaccatcgtttgtcataactccggatagagaaatatattgcggcatatataaagttggaatttgactatcgactgcgaagacattagaccgtttaatagagtcatccccaccgatcaaagaattaatgatagtattattcattttctatttaaaatggaaaaagcttacaataaactccgtagagaaatatctataatttgtgagttttccttaaagtaacagcttccgtaaacgccgtctttatctcttagtaagtttattgtatttataaccttttccttatcttcatagaatactaaaggcaacaaagaaatttttggttcttctctaagagctacgtgagacttaaccatagacgccaacgaatccctacatattttagaacagaaatacccaacttcaccacccttgaatgtctcaatactaataggtttaaaaaccaaatcttgattacaaaaccaacacttatcaattacactatttgtcttaatagacacatctgccatagatttataatactttggtagtatacaagcgagtgcttcttctttagcgggcttaaagactgctttaggtgctgaaataaccacatctggaaggcttactcgcttagccatttaattacggaactatttttttatacttctaatgagcaagtagaaaacctctcatctacaaaaacatactcgtgtccataatcctctaccatagttacacgttttttagatctcatatgtgctaaaaagttttcccatactaattggttactattatttttcgtataatttttaacagtttgaggttttagatttttagttacagaagtgatatcgaatattttatccaaaaagaatgaataattaattgtcttagaaggagtgttttcttggcaaaagaataccaagtgcttaaatatttctactacttcattaatcttttctgtactcagattcagtttctcatcttttacttgattgattatttcaaagactaacttataatcctttttatttattctctcgttagccttaagaaaactagatacaaaatttgcatctacatcatccgtggatatttgatttttttccatgatatccaagagttccgagataatttctccagaacattgatgagacaataatctccgcaatacatttctcaaatgaataagtttattagacacgtggaagtttgactttttttgtacctttgtacatttttgaaataccgactcgcaaaaaatacaatattcatatccttgttcagatactataccgttgtgtctacaaccgctacataatcgtagattcatgttaacactctacgtatctcgtcgtccaatattttatataaaaacattttatttctagacgttgccagaaaatcctgtaatatttttagttttttgggctgtgaataaagtatcgccctaatatggttaccgtcctccgccaatatagtagttaaattatccgcacatgcagaagaacaccgcttaggcggattcagtacaatgttatatttttcgtaccaactcatttaaatatcataatctaaaatagttctgtaatatgtctagcgctaatatattgatcataatcctgtgcataaattaagatacaacaatgtctcgaaatcatcgacatggcttcttccatagttagaagatcgtcgtcaaagttagcaacgtgattcatcaacatttgctgttttgaggcagcaaatactgaaccgtcgccattcaaccattcataaaaaccatcgtctgaatccattgataatttcttgtactggtttttgagagctcgcatcaatctagcatttctagctcccggattgaaaacagaaagaggatcgtacatccagggtccattttctgtaaatagaatcgtataatgtcccttcaagaagatatcagacgatccacaatcaaagaattgatctccgagtttgtaacaaactgcggactttaacctatacatgataccgtttagcatgatttctggtgatacgtcaatcggagtatcatctattagagatctaaagccggtgtaacattctccaccaaacatattcttattctgacgtcgttctacataaaacatcattgctccattaacgataacaggggaatgaacagcactacccatcacattagttcccaatggatcaatgtgtgtaactccagaacatcttccatagcctatgttaggaggagcgaacaccactcttccactattgccatcgaatgccatagaataaatatccttggaattgatagaaatcggactgtcggatgttgtgatcatcttcataggattaacaactatgtatggtgccgcctgaagtttcatatcgtaactgatgccgtttataggtctagccacagaaaccaacgtaggtctaaatccaactatagacaaaatagaagccaatatctgttcctcatctgtcataacttgagagcatccagtatgaataatcttcattagatggggatctaccgcatcatcatcgttacaataaaaaattcccattctaatgttcataattgcttttctaatcatggtatgcatgtttgctctctgaatctctgtggaaattagatctgatacacctgtaatcactatcggattatcctccgtaagacgattaaccaacaacatataattataagactttacttttctaaattcataaagttgctggattaggctataggtgtctccatgtacatacgcgttctcgagcgcaggaagtttaataccgaatagtgccatcagaataggatgaatatagtaattagtttctggttttctataaataaaagacaaatcttgtgaactagacatatcggtaaaatgcatggattggaatcgtgtagtcgacagaagaatatgatgattagatggagagtatattttatctaactctttgagttggtcaccgattctaggactagctcgagaatgaataagtactaaaggatgagtacatttcacagaaacactagcattgttcaatgtgctctttacatgggtaaggagttgaaatagctcgtttctatttgttctgacaatatttagtttattcataatgttaagcatatcctgaatagtaaagttagatgtgtcatacttgttagtagttagatatttagcaattgcattcccatcatttctcaatctcgtactccaatcatgcgtggatgctacttcgtcgatggaaaccatacaatcctttttgataggctgttgagattgattatttcctgcacgtttaggtttggtacgttgatttctagcccctgcggatataaagtcatcgtctacaattttggataatgaattgcatacactacaagacaaagatttatcagaagtgtgaatatgatcttcatctaccaaagaaagagtttgattagtataactagattttagtcctgcgttagatgttaaaaaaacatcgctattgaccacggcttccattatttatattcgtagtttttactcgaaagcgtgattttaatatccaatcttattacttttggaatcgttcaaaacctttgactaattgtagaatttgatctattgccctacgcgtatactcccttgcatcatatacgttcgtcaccagatcgtttgtttcggcctgaagttggtgcatatctctttcaacattcgacatgagatccttaagggccatatcgtctagattttgttgagatgttgctcctggattttgttgtgctgttgtacatactgtaccaccagtaggtgtaggagtacatacagtggccacaataggaggttgaggaggtgtaaccgttggagtagtacaagaaatatttccatccgattgttgtgtacatgtagttgttggtaacgtctgagaaggttgggtagatggcggtgtcgtcgtcttttgatctttattaaatttagagataatatcctgaacagcattgctcggcgtcaacgctggaaggagtgaactcgccggcgcatcagtatctgcagacagccaatcaaaaagattagacatatcagatgatgtattagtttgttgtcgtggttttggtgtaggagcagtactactaggtagaagaataggagccgatgtaggtgtcggaaccggaaccggctgtggagttatatgaatagttggttgtagcggttggataggctgtctgctggcggccatcatattatctctagctagttgttctcgcaactgtctttgataatacgactcttgagactttagtcctatttcaatcgcttcatcctttttcgtatccggatccttttcttcagaataatagattgacgactttggtgtagaggattctgccagcccctgtgagaacttgttaaagaagtccatttaaggctttaaaattgaattgcgattataagattaaatggcagacacagacgatattatcgactatgaatccgatgatctcactgaatacgaggatgatgaagaagaggaagaagatggagagtcactagaaactagtgatatagatcccaaatcttcttataagattgtagaatcagcatccactcatatagaagatgcgcattccaatcttaaacatatagggaatcatatatctgctcttaaacgacgctatactagacgtataagtctatttgaaatagcgggtataatagcagaaagctataacttgcttcaacgaggaagattacctctagtttcagaattttctgacgaaacgatgaagcaaaatatgctacatgtaattatacaagagatagaggagggttcttgtcctatagtcatcgaaaagaacggagaattgttgtcggtaaacgattttgacaaagatggtctaaaattccatctagactatattatcaaaatttggaaacttcaaaaacgatattagaatttatacgaatatcgttctctaaatgtcacaatcaagtctcgcatgttcagcaatttattgtcgtactttatatcgtgttcattaacgatatcttgcaaaatagtaatgattctatcttccttcgatagatattcttcagagattattgtcttatattctttcttgttatcagatatgaatttgataagactttgaacattattgatacccgtctgtttaattttttctacagatattttagttttggcagattctatcgtatctgtcaatagacatccaacatcgacattcgacgtcaattgtctataaatcaacgtataaattttagaaataacattagcgaattgttgtgcattgatgtcgttattctgaaacagtatgattttaggtagcattttcttaacaaagagaacgtatttattgttactcagttgaacagatgatatatccagattactaacgcatctgattccgtataccaaactttcagaagaaatggtgtacaattgtttgtattcattcaatgtctccttttcagaaattagtttagagtcgaatactgcaataattttcaagagatagttttcatcagataagattttatttagtgtagatatgataaaactattgttttgttggagaacttgatacgccgcgttctctgtagtcgacgctctcaaatgggaaacgatctccattatttttttggaatcggatacaatatcttcggtatcttgacgcaatctagtatacatagagttaagagaaattagagtttgtacattgagcaacatgtctctaaatgtggctacaaacttttcctttttcacatcatctagtttattatataccgatttcacaacggcaccagatttaaggaaccagaatgaaaaactctgataactacaatatttcatcatagttacgattttatcatcttctatagttggtgtaatagcgcatacctttttctccaagactggaaccaacgtcataaaaatgtttaaatcaaaatccatatcaacatctgatgcgctaagaccagtctcgcgttcaagattatctttactaatggtgacgaactcatcgtatagaactctaagtttgtccattatttatttacagatttagttgtttaatttatttgtgctcttccagagttgggatagtatttttctaacgtcggtattatattattaggatctacgttcatatgtatcataatattaatcatccacgttttgataaatctatctttagcttctgaaataacgtatttaaacaaaggagaaaaatatttagctacggcatcagacgcaataacattttttgtaaatgtaacgtatttagacgacagatcttcgttaaaaagttttccatctatgtagaatccatcggttgttaacaccattcccgcgtcagattgaataggagtttgaatagtttgttttggaaatagatccttcaataacttatagttgggtgggaaaaaatcgattttatcactagactctttcttttttactatcattacctcatgaactatttcttgaatgagtatatgtattttctttcctatatcggacgcgttcattggaaaatataccatgtcgttaactataagaatatttttatcctcgtttacaaactgaataatatcagatgtagttcgtaaacgaactatatcatcaccagcacaacatctaactatatgatatccactagtttcctttagtcgtttattatcttgttccatattagcagtcattccatcatttaagaaggcgtcaaagataatagggagaaatgacattttggattctgttacaactttaccaaaattaaggatatacggacttactatctttttttcaacgtcaatttgatgaacacacgatgaaaatgtacttcgatgagattgatcatgtagaaaacaacaagggatacaatatttccgcatatcatgaaatatattaagaaatcccaccttattatatttccccaaaggatccatgcacgtaaacattatgccgttatcattaataaagacttctttctcatcggatctgtaaaagttgttactgatttttttcattccaggatctagataattaataatgatgggttttctattcttattctttgtattttggcatatcctagaccagtaaacagtttccactttggtaaaatcagcagacttttgaacgctattaaacatggcattaatggcaataactaaaaatgtaaaatatttttctatgttaggaatatggtttttcactttaatagatatatggtttttggccaaaatgatagatatttttttatccgaggatagtaaaatattattagtcgccgtctctataaaaatgaagctagtctcgatatccaattttattctagaattgataggagtcgccaaatgtaccttatacgttatatctcccttgatgcgttccatttgtgtatctatatcggacacaagatctgtaaatagttttacgttattaatcatcacggtatcgccgtcgctagataacgctaatgtaccatccaagtcccaaatggagagatttaactgttcatcgtttagaataaaatgattaccggtcatattaataaagtgttcatcgtatctagataacaacgacttataattaatgtccaagtcttgaactcgctgaatgatcttttttaacccagttagttttagattggtacgaaatatattgttaaactttgattctacagtaatgtccaaatctagttgtggaaatacttccatcaacattgtttcaaacttgataatattattatctacatcttcgtacgatccaaattccggaatagatgtatcgcacgctctagccacccagataaccaaaaagtcacacgctccaggatatacattgtataaaaagctatcgttttttagtagtgtttttttctgagtatatacgaagggattaaaaatagtattatcaacgtaactatattccaaattattcttatgagaatagataataatatcgtccttaatatctaacaaatttcctaaatatccctttaattgagtcattcgaagcgtcaatagaatatgtctcttaactatttccggctgttgtatatttaaatgacttcgtaaaaaataatatatgggcgacttctcatctatgtaatcatatggagtgagatatagggctcgttctacctcctgccccttacccacctgtaataccaattgcggacttactatatatcgcatatttatatcgtggggtaaagtgaaaatctactaccgatgatgtaagtcttacaatgttcgaaccagtaccagatcttaatttggaggcctccgtagaactaggggaggtaaatatagatcaaacaacacctatgataaaggaaaatagcggttttatatcccgtagtagacgtctattcgcccatagatctaaggatgatgagagaaaactagcactacgattctttttacaaagactttattttttagatcatagagagattcattatttgttcagatgcgttgacgctgtaaaagacgtcactattaccaaaaaaaataacattatcgtggcgccttatatagcacttttaactatcgcatcaaaaggatgcaaacttacagaaacaatgattgaagcattctttccagaactatataatgaacatagtaagaaatttaaattcaactctcaagtatccatcatccaagaaaaactcggataccagtttggaaactatcacgtttatgattttgaaccgtattactctacagtagctctggctattcgagatgaacattcatctggcatttttaatatccgtcaagagagttatctggtaagttcattatctgaaataacatatagattttatctaattaatctaaaatctgatcttgttcaatggagtgctagtacgggcgctgtaattaatcaaatggtaaatactgtattgattacagtgtatgaaaagttacaactggtcatagaaaatgattcacaatttacatgttcattggctgtggaatcagaacttccaataaaattacttaaagatagaaatgaattatttacaaaattcatcaacgagttaaaaaagaccagttcattcaagataagcaaacgcgataaggatacgctactaaaatattttacttaggactggagttagaatttatagacgactcatttcgtttatcattgttactattattactattactatcattattagtgttggcattattagtattcttcttgtcatcttgttcagaaatatacagcaatgctatacctaatactaaatacattatcatgctcgcaatggctctaacaacgacgaaccaaaatgaatttggtcgtagcttttgttcacaaaaatacataaagaaatgtctacataaatctatggcgccattggctacttgaaatagcgccagtcctcctacagattttaatatagctgtataacatgacatttattcatcatcaaaagagacagagtcaccatctgtcatatttagattttttttcatgtgttcaaagtatcctctactcatttcattataatagtttatcatacttagaattttaggacggatcaatgagtaagacttgactagatcgtcagtagtaatttgtgcatcgtctattctgcatccgcttcgtcgaataatgtatagcatcgctttgagattctccatagctatcaagtctttatacaatgacatggaaatatctgtgaatactttatacttctccaacatcgatgccttaacatcatcgcctactttagcattgaaaatacgttctattgtgtagatggatgtaacaagatttttaaacaacaatgccattttacacgatgattgtctcaagtctccaatcgtttgtttagaacgattagctacagagtccaatgcttggctgactagcatattattatctttagaaattgtattcttcaatgaggcgtttatcatatctgtgatttcgttagtcatattacagtctgactgggttgtaatgttatccaacatatcacctatggatacggtacacgtaccagcatttgtaataatcctatctaagatgttgtatggcattgcgcagaaaatatcttctcctgtaatatctccactctcgataaatctactcagattattcttaaatgccttattctctggagaaaagatatcagtgtccatcatttcattaatagtatacgcagaaaagataccacgagtatcaattctatccaagatacttatcggttccgagtcacagataatggtttcctctccttcgggagatcctgcatagaaatatctaggacaatagtttctatactgtctgtaactctgataatctctaaagtcactaactgataccatgaaattgagaagatcaaacgctgaagtaattaatttttctgcctcgtttttactacaactagttttcatcaatgtagtgacgatgtattgtttagttactcttggtctaatactgatgatagagatattattacttcccataatggatcttctagtagtcaccttaaagcccattgatgcaaatagcagatagataaagtcttggtatgactcctttctaatatagtacggactacctttgtcacccaactttatacccacataagccataacaacctctttaatagccgtttcatgaggtttatcagccatgagcctgagtagttggaagaatctcatgaatcccgtctcagaaagtcctatatgcatgatagatttatctttcctgggaaactctcgtatagtcatagatgaaatactcttcaaagtttctgaaataagattagtaacagtcttacctccgactactctaggtaacaaacaaactctaataggtgttttctctgcggagataatatcagaaaggatagagcaataagtagtattattgtgattataaagaccgaatacataacaggtagaatttataaacatcatgtcctgaaggtttttagacttgtattcctcgtaatccataccgtcccaaaacatggatttggtaactttgatagccgtagatctttgttccttcgccaacaggttaaagaaattaataaagaatttgtggtttctacctatgtctacaaattgcacgtttggaagcgtaactgttacgttcactgcagcattttgaggatttcgagtatgaagtacgatgttattgtttactggtatatctggaaagaattctaccagtctaggaataagagattgatatcgcatagaaatacaaaagttcataatctcatcatcgaagagcattttgttaccattgtaataaatatccactctgtcatatgtataaatgaagtactgttcaaacatgatgagatgtttatatgttggcatagtagtgagatcgacgtttggtaatggcaatgtattaagattaactccataatgtctagcagcatctgcgatgttataagcgtcgtcaaagcggggtcgatcttgtgctgttatatattgtctaacacctataagattatcaaaatcttgtctgcttaatacaccgttaacaatttttgccttgaattcttttattggtgcattaataacatccttatagaggatgttaaacaaataagtattatcaaagttaagatctgggtatttcttttctgctagaacatccattgagtcggagccatctggtttaatataaccaccgataaatctagctctgtattctgtatccgtcaatctaatattaagaaggtgttgagtgaaaggtggaagatcgtaaaagctgtgagtattaataatagggttagtttccgaactaatgttaattggggtattaataatatctatatttccagcgttaagtgtaacattaaacagttttaattcacgtgacgtggtatcaattaaataattaatgcccaatttggatatagcagcctgaagctcatcttgtttagttacggatcctaatgagttattaagcaatatatcgaacggatgaacgaaggttgttttaagttggtcacatactttgtaatctagacatagatgcggaagaacggtagaaactatacgaaataaatattcagagtcctctaattgatcaagagtaactattgacttaataggcatcatttatttagtattaaatgacgaccgtaccagtgacggatatacaaaacgatttaattacagagttttcagaagataattatccatctaacaaaaattatgaaataactcttcgtcaaatgtctattctaactcacgttaacaacgtggtagatagagaacataatgccgccgtagtgtcatctccagaggaaatatcctcacaacttaatgaagatctatttccagatgatgattcaccggccactattatcgaacgagtacaacctcatactactattattgacgatactccacctcctacgtttcgtagagagttattgatatcggaacaacgtcaacaacgagaaaaaagatttaatattacagtatcgaaaaatgctgaagcaataatggaatctagatctatgataacttctatgccaacacaaacaccatccttgggagtagtttatgataaagataaaagaattcagatgttagaggatgaagtggttaatcttagaaatcaacgatctaatacaaaatcatctgataatttagataattttaccaaaatactatttggtaagactccgtacaaatcaacagaagttaataagcgtatagccatcgttaattatgcaaatttgaacggctctcccttatcagtcgaggacttggatgtttgttcagaggatgaaatagatagaatctataaaacgattaaacaatatcacgaaagtagaaaacgaaaaattatcgtcactaacgtgattattattgtcataaacattatcgagcaggcattgctaaaactcggatttgaagaaatcaaaggactgagtaccgatatcacttcagaaattatcgatgtggagatcggagatgactgcgatgctgtagcatctaaactaggaatcggtaacagtccggttcttaatattgtattgtttatactcaagatattcgttaaacgaattaaaattatttaatttaatacattcccatatccagacaacaatcgtctggattaatctgttcctgtcgtctcataccggacgacatattaatctttttattagtgggcatctttttagatggtttctttttcccagcattaactgattcgatacctagaagatcgtgattgatctctccgaccattccacgaacttctaattggccgtctctgacggtaccataaactattttaccagcattagtaacagcttggacaatctgaccatccatcgcattgtacgatgtagtagtaactgttgttctacgtttaggagcaccagaagtatttttggagcccttggatgttgatgtagaagaagacgaggattttgattttggtttacatgtaatacattttgaactctttgattttgtatcacatgcgccggcagtcacatctgtttgagaattaagattattgttgcctcctttgacggctgcatctccaccgatttgcgctagtagatttttaagctgtggtgtaatcttattaactgtttcgatataatcatcgtaactgcttctaacggctaaattttttttatccgccatttagaagctaaaaatatttttatttatgcagaagatttaactagattatacaatgaactaatatgatccttttccagattatttacaaacttggtatttcttggttctggaggaggcgaatttaaattcggacttggattcggattttgtgggttcttgatcttattatacagcgcatataggatggcgacggtaactgctacgcaaataccgatcaacaaaagaataccaatcatttattgacaataacttcactattgatcaagtatgcaatatatcatcttttcactaaataagtagtaataatgattcaacaatgtcgagatatatggacgataataacttagttcacggaaatatcgctatgattggtgtgaatgactccgctaactctgtggggcgcgcagtgctttccccacatagaataaattagcattccgactgtgataataataccaagtataaacgccataatactcaatactttccatgtacgagtgggactggtagacttactaaagtcaataaaggcgaagatacacgaaagaatcaaaagaatgattccagcgattagcacgccggaaaaataatttccaatcataagcatcatgtccatttaactaataaaaattttaaatcgccgaatgaacaaagtggaatataaaccatataaaaacaatagtttgtactgcaaaaataatatctatttttgttttcgaagatatggtaaaattaaatagtagtacacagcatgttataactaacagcagcaacggctcgtaattacttatcatttactagacgaaaaggtggtgggatattttcttgctcaaataatacgaatatatcacccatccattttatgcgatgtttatatactctaatctttaatagatctatagacgacgggtttaccaacaatatagattttatcgattcatctaatttaaacccttccttaaacgtgaatgatctattatctggcataacgatgactctacctgatgaatcggacaatgtactgggccatgtagaataaattatcaacgaattatcgtctacgaacatttatatcatttgttttaattttaggacgcgaataaatggatataaaatagaaaataacagatattacaaccagtgttatggccgcgcccaaccaggtaggcagttttattttatcttttactacaggttctcctggatgatgtacgttaccaactgcagacgtagttctagtacaattagacgtaagttccgcttgggaattttttaacgctaaagagttaacgttaatcgtgcacccaacgtatttacatctagttctttgaacatcttgattataatataaccattttctatctctagattcgtcggtgcactcatgtaaccaacataccctaggtcctaaatatttatctccggaattagattttggataattcgcgcaccaacaatttctatttcctttatgatcgttacaaaagacgtataatgccgtatccccaaaagtaaaataatcaggacgaataattctaataaactcagaacaatatctcgcatccatatgtttggagcaaatatcggaataagtagacatagccggtttccgttttgcacgtaaccattctaaacaattggggtttccaggatcgtttctacaaaatccagtcatgaaatcatcacaatgttctgtcttgtaattattattaaatatttttggacagtgtttggtatttgtcttagaacaacattttgccacgctatcactatcgcccaggagataatccttttttataaaatgacatcgttgcccggatgctatataatcagtagcgtgttttaaatccttaatatattcaggagttacctcgttctgataatagattaatgatccaggacgaaatttgaaagaactacatggttctccatgaattaatacatattgtttagcaaattcaggaactataaaactactacaatgatctatcgacataccatctatcaaacaaaatttgggtttaatttctcctggagacgtttcataataatacatataactttcttcggcaaacttaacagctctattatattcaggataattaaaacctaattccatatatttgtctcgtatatctgctattcctggtgctattttaattctattaagagtaacggctgcccccatttttaataatcgtcagtatttaaactgttaaatgttggtatatcaacatttaccttatttcccgcagtataaggtttgttgcaggtatactgttcaggaatggttacatttatacttcttctatagtcctgtctttcgatgttcatcacatatgcaaagaacagaataaacaaaataatgtaagaaataatattaaatatctgtgaattcgtaaatacattgattgccataataattacagcagctacaatacatacaatagacattcccacagtgttgccattacctccacgatacatttgagttactaagcaataggtaataactaagctagtaagaggcaatagaaaagatgagataaatatcatcaatatagagattagaggagggctatatagagccaagacgaacaaaatcaaaccgagtaacgttctaacatcattatttttgaagattcccaaataatcattcattcctccataatcgttttgcatcatacctccatctttaggcataaacgattgctgctgttcctctgtaaataaatctttatcaagcactccagcacccgcagagaagtcgtcaagcatattgtaatatcttaaataactcatttatatattaaaaaatgtcactattaaagatggagtataatctttatgccgaactaaaaaaaatgacttgtggtcaacccctaagtctttttaacgaagacggggattttgtagaagttgaaccgggatcatcctttaagtttctgatacctaagggattttacgcctctccttccgtaaagacgagtctagtatttgaaacattaacaacgaccgataataaaatcactagtatcaatccaacaaatgcgccaaagttatatcctcttcaacgcaaagtcgtatctgaagtagtttctaatatgaggaaaatgatcgaatcaaaacgtcctctatacattactcttcacttggcgtgtggatttggtaagactattaccacgtgttatcttatggctacacacggtagaaaaaccgtcatttgcgtacccaataaaatgttaatacatcaatggaagacacaggtagaggcagtcggattggaacataagatatccatagatggagtaagtagtctattaaaggaactaaagactcaaagtccggatgtattaatagtagtcagtagacatctgacaaacgatgccttttgtaaatatatcaataagcattatgatttgttcatcttggatgaatcacatacgtataatctgatgaacaatacagcagttacaagatttttagcgtattatcctccgatgatgtgttattttttaactgctacacctagaccatctaacagaatttattgtaacagtattattaatattgccaagttatccgatctaaaaaaaactatctatgcggtagatagtttttttgagccatattccacagacaatattagacatatggtaaaacgactagatggaccatctaataaatatcatatatataccgagaagttattatctgtagacgagcctagaaatcaacttattcttaataccctggtagaagaattcaagtcaggaactattaatcgcattttagttattactaaactacgtgaacatatggtattattctacaaacgattattagatcttttcggaccagaggttgtatttataggagacgcccaaaatagacgtactccagatatggtcaaatcaatcaaggaactaaatagatttatattcgtatccaccttattttattccggtactggtttagatattcctagtttggattctttgttcatttgctcggcagtaatcaacaatatgcaaatagagcaattactagggaggatatgtcgagaaacagaactattagataggacggtatatgtatttcctagcacatccatcaaagaaataaagtacatgataggaaatttcgttcaacgaattattagtctgtctgtagataaactaggatttaaacaaaaaagttatcggaaacatcaagaatccgatcccacttctgcatgtacaacatcatccagagaagaacgtgtattaaatagaatatttaactcgcaaaatcgttaagaagtttaagcgacgatccgcatgctgcgcaggccagtgtattacccctcatagtattaatataatccaatgatacttttgtgatgtcggaaatcttaaccaatttagactgacaggcagaacacgtcatgcaatcatcatcgtcatcgataactgtagtcttgggcttctttttgcgactcttcattccggaacgcacattggtgctatccatttaggtagtaaaaaataagtcagaatatgccctatagcacgatcgtgcaaaacctggtatatcgtctctatctttatcacaatatagtgtatcgacatttttattattattgacctcgtttatcttggaacatggaatggaaacatttttgttatcaacggccacctttgccttaattccagatgttgtaaaattataactaaacagtctatcatcgacacaaatgaaattcttgtttagacgtttgtagtttacgtatgcggctcgttcgcgtctcattttttcagatattgcaggtactataatattaaaaataagaatgaaataacataggattaaaaataaagttatcatgacttctagcgctgatttaactaacttaaaagaattacttagtctgtacaaaagtttgagattttcagattctgcggctatagaaaagtataattctttggtagaatggggaacatctacttactggaaaataggcgtgcaaaaggtagctaatgtcgagacgtcaatatctgattattatgatgaggtaaaaaataaaccgtttaatattgatccgggctattacattttcttaccggtatattttgggagcgtctttatttattcgaagggtaaaaatatggtagaacttggatctggaaactcttttcaaataccagataatatgcgaagtgcgtgtaacaaagtattagatagtgataacggaatagactttctgagatttgttttgttaaacaatagatggataatggaagatgctatatcaaaatatcagtctccagttaatatatttaaactagctagtgagtacggattaaacatacccaaatatttagaaattgaaatagaggaagacacattatttgacgacgagttatactctattatagaacgctcttttgatgataaatttccaaaaatatccatatcgtatattaagttgggagaacttaggcggcaagttgtagactttttcaaattctcattcatgtatattgagtccatcaaggtagatcgtataggagataatatttttattcctagcgttataacaaaatcaggaaaaaagatattagtaaaagatgtagaccatttaatacgatccaaggttagagaacatacatttgtaaaagtaaaaaagaaaaacacattttccattttatacgactatgatggaaacggaacagaaactagaggagaagtaataaaacgaattatagacactataggacgagactattatgttaacggaaagtatttctctaaggttggtagtgcaggcttaaagcaattgactaataaattagatattaatgagtgcgcaactgtcgatgagttagttgatgagattaataaatccggaactgtaaaacgaaaaataaaaaaccaatcagcatttgatttaagcagagaatgtttgggatatccagaagcggattttataacgttagttaataacatgcggttcaaaatagaaaattgtaaggttgtaaatttcaatattgaaaatactaattgtttaaataacccgagtattgaaactatatatggaaactttaaccagttcgtctcaatctttaatgtcgtcaccgatgtcaaaaaaagattattcgagtgaaataatatgcgcctttgatataggtgcaaaaaatcctgccagaactgttttagaagtcaaggataactccgttagggtattggatatatcaaaattagactggagttctgattgggaaaggcgcatagctaaagatttgtcacaatatgaatacactacagttcttctagaacgtcagcctagaaggtcgccgtatgttaaatttatctattttattaaaggctttttatatcatacatcggctgccaaagttatttgcgtctcgcctgtcatgtctggtaattcatatagagatcgaaaaaagagatcggtcgaagcatttcttgattggatggacacattcggattgcgagactccgttccggatagacgcaaattagacgatgtagcggatagtttcaatttggctatgagatacgtattagataaatggaatactaattatacaccttataataggtgtaaatctagaaattacataaaaaaaatgtaataatagggataacagggtaat

SEQ ID NO: 31 - DNA, 25970 bp, Vaccinia virus
tagggataacagggtaatttaggtagtaaaaaataagtcagaatatgccctatagcacgatcgtgcaaaacctggtatatcgtctctatctttatcacaatatagtgtatcgacatttttattattattgacctcgtttatcttggaacatggaatggaaacatttttgttatcaacggccacctttgccttaattccagatgttgtaaaattataactaaacagtctatcatcgacacaaatgaaattcttgtttagacgtttgtagtttacgtatgcggctcgttcgcgtctcattttttcagatattgcaggtactataatattaaaaataagaatgaaataacataggattaaaaataaagttatcatgacttctagcgctgatttaactaacttaaaagaattacttagtctgtacaaaagtttgagattttcagattctgcggctatagaaaagtataattctttggtagaatggggaacatctacttactggaaaataggcgtgcaaaaggtagctaatgtcgagacgtcaatatctgattattatgatgaggtaaaaaataaaccgtttaatattgatccgggctattacattttcttaccggtatattttgggagcgtctttatttattcgaagggtaaaaatatggtagaacttggatctggaaactcttttcaaataccagataatatgcgaagtgcgtgtaacaaagtattagatagtgataacggaatagactttctgagatttgttttgttaaacaatagatggataatggaagatgctatatcaaaatatcagtctccagttaatatatttaaactagctagtgagtacggattaaacatacccaaatatttagaaattgaaatagaggaagacacattatttgacgacgagttatactctattatagaacgctcttttgatgataaatttccaaaaatatccatatcgtatattaagttgggagaacttaggcggcaagttgtagactttttcaaattctcattcatgtatattgagtccatcaaggtagatcgtataggagataatatttttattcctagcgttataacaaaatcaggaaaaaagatattagtaaaagatgtagaccatttaatacgatccaaggttagagaacatacatttgtaaaagtaaaaaagaaaaacacattttccattttatacgactatgatggaaacggaacagaaactagaggagaagtaataaaacgaattatagacactataggacgagactattatgttaacggaaagtatttctctaaggttggtagtgcaggcttaaagcaattgactaataaattagatattaatgagtgcgcaactgtcgatgagttagttgatgagattaataaatccggaactgtaaaacgaaaaataaaaaaccaatcagcatttgatttaagcagagaatgtttgggatatccagaagcggattttataacgttagttaataacatgcggttcaaaatagaaaattgtaaggttgtaaatttcaatattgaaaatactaattgtttaaataacccgagtattgaaactatatatggaaactttaaccagttcgtctcaatctttaatgtcgtcaccgatgtcaaaaaaagattattcgagtgaaataatatgcgcctttgatataggtgcaaaaaatcctgccagaactgttttagaagtcaaggataactccgttagggtattggatatatcaaaattagactggagttctgattgggaaaggcgcatagctaaagatttgtcacaatatgaatacactacagttcttctagaacgtcagcctagaaggtcgccgtatgttaaatttatctattttattaaaggctttttatatcatacatcggctgccaaagttatttgcgtctcgcctgtcatgtctggtaattcatatagagatcgaaaaaagagatcggtcgaagcatttcttgattggatggacacattcggattgcgagactccgttccggatagacgcaaattagacgatgtagcggatagtttcaatttggctatgagatacgtattagataaatggaatactaattatacaccttataataggtgtaaatctagaaattacataaaaaaaatgtaataacgttagtaacgccattatggataatctatttacctttctacatgaaatagaagatagatatgccagaactatttttaactttcatctaataagttgcgatgaaataggagatatatatggtcttatgaaagaacgcatttcctcagaggatatgtttgataatatagtgtataataaagatatacatcatgccattaagaaactagtgtattgcgacatccaacttactaaacacattattaatcagaatacgtatccggtatttaacgattcttcacaagtgaaatgttgtcattatttcgatataaactcagataatagcaatattagctctcgtacagtagagatatttgagagggaaaagtcatctcttgtatcatatattaaaactaccaataagaagagaaaggtcaattatggggaaataaagaaaactgtacatggaggcactaatgcaaattacttttccggtaaaaagtctgatgagtatctgagcactacagtcaggtccaacattaatcaaccttggatcaaaaccatttctaagagaatgagagtagatatcattaatcactctatagtaacgcgtggaaaaagctctatattacaaactatagaaattatttttactaatagaacatgtgtgaaaatattcaaggattctactatgcacattattctatccaaggacaaggatgaaaaggggtgtatacacatgattgacaaattattctatgtctattataatttatttctgttgttcgaagatatcatccaaaacgagtactttaaagaagtagctaatgttgtaaaccacgtactcacggctacggcattagatgagaaattattcctaattaagaaaatggctgaacacgatgtttatggagttagcaatttcaaaatagggatgtttaacctgacatttattaagtcgttggatcataccgttttcccctctctgttagatgaggatagcaaaataaagttttttaaggggaaaaagctcaatattgtagcattacgatctctggaggattgtataaattacgtgactaaatccgagaatatgatagaaatgatgaaggaaagatcgactattttaaatagcatagatatagaaacggaatcggtagatcgtctaaaagaattgcttctaaaatgaaaaaaaacactgattcagaaatggatcaacgactagggtataagtttttggtgcctgatcctaaagccggagttttttatagaccgttacatttccaatatgtatcgtattctaattttatattgcatcgattgcatgaaatcttgaccgtcaagcggccactcttatcgtttaagaataatacagaacgaattatgatagaaattagcaatgttaaagtgactcctccagattactcacctataatcgcgagtattaaaggtaagagttatgacgcattagccacgttcactgtaaatatctttaaagaggtaatgaccaaagagggtatatccatcactaaaataagtagttatgagggaaaagattctcatttgataaaaattccgctactaataggatacgggaataaaaatccacttgatacagccaagtatcttgttcctaatgtcataggtggagtctttatcaataaacaatctgtcgaaaaagtaggaattaatctagtagaaaagattacaacatggccaaaatttagggttgttaagccaaactcattcactttctcgttttcctccgtatcccctcctaatgtattaccgacaagatatcgccattacaagatatctctggatatatcacaattggaagcgttgaatatatcatcgacaaagacatttataacggtcaatattgttttgctgtctcaatatttatctagagtgagtctagaattcattagacgtagtttatcatacgatatgcctccagaagttgtctatctagtaaacgcgataatagatagtgctaaacgaattactgaatctattactgactttaatattgatacatacattaatgacctggtggaagctgaacacattaaacaaaaatctcagttaacgattaacgagttcaaatatgaaatgctgcataactttttacctcatatgaactatacacccgatcaactaaagggattttatatgatatctttactaagaaagtttctctactgtatctaccacacttctagatatccagatagagattcgatggtttgtcatcgtatactaacatacggcaaatattttgagacgttggcacatgatgaattagagaattacataggcaacatccgaaacgatatcatgaacaatcacaagaacagaggcacttacgcggtaaacattcatgtactaacaactcctggacttaatcatgcgttttctagcttattgagtggaaagttcaaaaagtcagacggtagttatcgaacacatcctcactattcatggatgcagaatatttctattcctaggagtgttggattttatccggatcaagtaaagatttcaaagatgttttctgtcagaaaataccatccaagtcaatatctttacttttgttcatcggacgttccggaaagaggtcctcaggtaggtttagtatctcaattgtctgtcttgagttccattacaaatatactaacgtctgagtatttggatttggaaaagaaaatttgtgagtatatcagatcatattataaagatgatataagttactttgaaacaggatttccaatcactatagaaaatgctctagtcgcatctcttaatccaaatatgatatgtgattttgtaactgactttagacgtagaaaacggatgggattcttcggtaacttggaggtaggtattactttagttagggatcacatgaatgaaattcgcattaatattggagcgggaagattagtcagaccattcttggttgtggataacggagagctcatgatggatgtgtgtccggagttagaaagcagattagacgatatgacattctctgacattcagaaagagtttccacatgtcatcgaaatggtagatatagaacaatttacttttagtaacgtatgtgaatcggttcaaaaatttagaatgatgtcaaaggatgaaagaaagcaatacgatttatgtgactttcctgccgaatttagagatggatatgtagcatcttcactagtgggaatcaatcacaattctggacccagagctattcttggatgtgctcaagctaaacaagctatctcttgtctgagttcggatatacgaaataaaatagacaatggaattcatttgatgtatccagagaggccaattgtcattagtaaggctttagaaacttcaaagattgcggctaattgcttcggccaacatgttactatagcattaatgtcgtacaaaggtatcaatcaagaggatggaattatcatcaaaaaacaatttattcagagaggcggtctggatatagttaccgcaaagaaacatcaagtagaaattccgttggaaaactttaataacaaagaaagagataggtctaacgcctattcaaaattagaaagtaatggattagttagactgaatgctttcttggaatccggagacgctatggcacgaaatatctcatcaagaactcttgaagatgattttgctagagataatcagattagcttcgatgtttccgagaaatataccgatatgtacaaatctcgcgttgaacgagtacaagtagaacttactgacaaagttaaggtacgagtattaaccatgaaagaaagaagacccattctaggagacaaatttaccactagaacgagtcaaaagggaacagtcgcgtatgtcgcggatgaaacggaacttccatacgacgaaaatggtatcacaccagatgtcattattaattctacatccatcttctctagaaaaactatatctatgttgatagaagttattttaacagccgcatattctgctaagccgtacaacaataagggagaaaaccgacctgtctgttttcctagtagtaacgaaacatccatcgatacatatatgcaattcgctaaacaatgttatgagcattcaaatccgaaattgtctgatgaagaattatcggataaaatcttttgtgaaaagattctctatgatcctgaaacggataagccttatgcatccaaagtattttttggaccaatttattacttgcgtctgagacatttaactcaggacaaggcaaccgttagatgtagaggtaaaaagacgaagctcattagacaagcgaatgagggacgaaaacgtggaggaggtattaagtttggagaaatggagagagactgtttaatagcgcatggcgcagccaatactattacagaagttttgaaagattcggaagaagattatcaagatgtgtatgtttgtgaaaattgtggagacatagcagcacaaatcaagggtattaatacatgtcttagatgttcaaaacttaatctctctcctctcttaacaaaaattgataccacgcacgtatctaaagtatttcttactcaaatgaacgccagaggcgtaaaagttaaattagatttcgaacgaaggcctccttcgttttataaaccattagataaagttgatctcaagccgtcttttctggtgtaatattctagtttggtagtagatacatatcaatatcatcaaattcgagatccgaattataaaatgggcgtggattgttaactatagaatcggacgtctgatattcgaaaatctgtggagtttcaggttttggtggaggtgtaactgctacttgggatactgaagtctgatattcagaaagctgggggatgttctggttcgacatccaccgatggtgtcacatcactaatcggttcggtaacgtctgtggatggaggtgctacttctacagaacctgtagcctcagttgtcaacggagatacatttttaatgcgaggaaatgtataatttggtaatggtttctcatgtggatctgaagaagaggtaagatatctactagaaagataccgatcacgttctagttctcttttgtagaacttaactttttctttctcagcatctagttgatattccaacctcttcacgttactacgttcagatttcaattcacgttcgcatgggttacctccgcagtttttacgagcgatttcacgttcagccttcatgcgtctttccctctctctatcgagtttatcagagcagtctttctgaaggcgatcgaactccataaatttctccaacgctttgattgtttccatagatttccgaagttcagcttttaggactgtgattctttttctttcgaattcacagctggatgtacaaccgtttccattaccgccatctctaagtttcttttctagatcggcaacatttcatccccatgccttttacattcctcgagtctactgtcgtcgaaatatcgttccagctccttttcgacatcaataactttagcacgttgtctctcaagctctcttttgtagttatctgattccctggcacgtttaagatcttcatgcaattgagtcagctcttaacacaatctcttgcttcttcgtcatagtacttacaatcactatgggatccattgttaccacgtctacactcggcgagctcgcgtttaagagattcaatttcccgtttgtattggtccatgtttccattgctaccaccattagatttacaggctgctagttgtcgttcgagatcagaaatacgggttttcttggaattgatttcgtcgatgtacttggcatcgaaacacttattaagttctttttccaattctacgattttatttctttcgcgagtcaattccctcctgtagtaactatctgttttgtcagattcacgctctctacgtagactttcttgcaagttactaatttgttccctagcacgtccgagtttagttttatatgccgaatagagttctgattcatcctttgagcagatctctagagatcgttcaagatccctgattctagtctttagcctatttacctcctcggaagatgctccgttaccgttgcgtttacactcgttaagctgtctatcaagatccatgattctatctctaagacgttgcatctctctttccatatcagcattgctttcattattacgtctgcagtcactcaactgtctttcaatatctgagattctatctctaagacgtcgcatctctctctgtttcggcattggtttcattattacgtctacagtcgttcaactgtctttcaagatctgatattctagattggagtctgctaatctctgtagcattttcacggcattcactcagttgtctttcaagatctgagattttagattggagtctgctaatctctgtaagatttcctcctccgctctcgatgcagtcggtcaacttattctctagttctctaatacgcgaacgcagtgcatcaacttcttgcgtgtcttcctggttgcgtgtacattcatcgagatctctaacgcgtcgtcgttcttcctcaagttctctgcgtactacagaaagcgtgtccctatcttgttgatatttagcaatttctgattctagagtactgattttgcttacgtagttactaatatttgtcttggccttatcaagatcctccttgtatttgtcgcattccttgatatccctacgaagtctggacagttcccattcgacattacgacgtttatcgatttcagctcggagatcgtcatcgcgttgttttagccacatacgactgagttcaagttctcgttgacaagatccatctacttttccattcctaatagtatccagttccttttctagttctgaacgcatttctcgttccctatcaagcgattctctcaattctcggatagtcttcttatcaatttctaataaatctgaaccatcatctgtcccattttgaatatccctgtgttctttgatctcttttgtaagtcggtcgattctttcggttttataaacagaatccctttccaaagtcctaatcttactgagtttatcactaagttctgcattcaattcggtgagttttctcttggcttcttccaactctgttttaaactctccactatttccgcattcttcctcgcatttatctaaccattcaattagtttattaataactagttggtaatcagcgattcctatagccgttcttgtaattgtgggaacataattaggatcttctaatggattgtatggcttgatagcatcatctttatcattattagggggatggacaaccttaattggttggtcctcatctcctccagtagcgtgtggttcttcaataccagtgttagtaataggcttaggcaaatgcttgtcgtacgcgggcacttcctcatccatcaagtatttataatcgggttctacttcagaatattcttttctaagagacgcgacttcgggagttagtagaagaactctgtttctgtatctatcaacgctggaatcaatactcaagttaaggatagcgaatacctcatcgtcatcatccgtatcttctgaaacaccatcatatgacatttcatgaagtctaacgtattgataaacagaatcagatttagtattaaacagatccttaacctttttagtaaacgcatatgtatattttagatctccagatttcataatatgatcacatgccttaaatgtcagtgcttccatgatataatctggaacactaatgggtgacgaaaaagatacagcaccatatgctacgttgataaataaatctgaaccactaagtagataatgattaatgttaaggaaaagaaaatattcagtgtataggtatgtcttggcgtcatatcttgtactaaacacgctaaacagtttattgatgtgatcaatttccaacagaataattagagcagcaggaataccaacaaacatattaccacatccgtattttctatgaatatcacatatcatgttaaaaaatcttgatagaagagcgaatatctcgtctgacttaatgagtcgtagttcagcagcaacataagtcataactgtaaatagaacatactttcctgtagtgttgattctagactccacatcaacaccattattaaaaatagttttatatacatctttaatctgctctccgttaatcgtcgaacgttctagtatacggaaacactttgatttcttatctgtagttaatgacttagtgatatcacgaagaatattacgaattacatttcttgtttttcttgacagacctgattcagaactcaactcatcgttccatagtttttctacctcagtggcgaaatctttggagtgcttggtacatttttcaataaggttcgtgacctccatttattataaaaaattttattcaaaacttaactacaatcgggtaattataaaatcgtagatctcccatgtggtggaatactaccatctatcgcatgtggatggacagtaggtaatggccatgggaacagtaatgtttgcatatttatctttcttgccagtattactgcatattgtcccaatgtttcgatgtgatgttctaacctatcaactgccgctgtatcacaacaatagtgtccgatgaaattaagattatgatccaatgtgtttaatatatgattatcaagtcttatacgatccgcgtcttttttgacaggatcaggttcttctacaggaagaagtttcggcctcttatgatattcatgtctgggaaacggtggtctagggtgaggctccggtatcggagtgggttttggattataatcatcatcgtctatgacatcatcttcgacttcgatatttattttgctatcttgatgatgtcctgtatcagttgcattttcagcactcgactgaatattagcgcattcattgtctattattaccatatttctaaatccaaaatgtatatgttgaacatcactactatcgttgatgagtcttatagcatgaattcgcttatcgttatcgggtttagcttctgtcaccttagcaattccttttttattaaactctacataatcatatccatttctattgtttgttctaatataaacgagtatagcatcattgctaaatttttcaatagtatcgaaaacagaatatcctaaaccatataatatatattcaggaacactcaaactaaatgtccaggattctcctaaatacgtaaactttaatagtgcgaaatcattcaaaaatctaccacttatagatagatagtacataaatgcgtatagtagtctacctatctctttattatgaaaaccggcattacgatcatatatatcatgatatacctgtgacccgtttacgttaaaccataaatacatgggtgatcctataaacatgaatttatttctaattctcagagctatagttaattgaccgtgtaatatttgcttacatgcatacttgatacgctcattaataagatttttatcattgctcgttatctcagaatcgtatatataaggagtaccatcgtgattcttaccagatattatacaaaatactatatataaaatatattgaccaacgttagtaatcatataaatgtttaacgttttaaattttgtattcaatgatccattatcatacgctagcatggtcttatgatattcattctttaaaatataatattgtgttagccattgcattggggctcctaatggagattttttattctcatccattttaggataggctttcataaagtccctaataacttcgtgaataatgtttctatgttttctactgatgcatgtatttgcttcgatttttttatcccatgtttcatctatcatagatttaaacgcagtaatgctcgcaacattaacatcttgaaccgttggtacaattccgttccataaatttataatgttcgccatttatataactcattttttgaatatacttttaattaacaaaagagttaagttactcatatggacgccgtccagtctgaacatcaatctttttagccagagatatcatagccgctcttagagtttcagcgtgattttccaacctaaatagaacttcatcgttgcgtttacaacacttttctatttgttcaaactttgttgttacattagtaatctttttttccaaattagttagccgttgtttgagagtttcctcattgtcgtcttcatcggctttaacaattgcttcgcgtttagcctctggctttttagcagcctttgtagaaaaaaattcagttgctggaattgcaagatcgtcatctccggggaaaagagttccgtccatttaaagtacagattttagaaactgacactctgcgttatttatatttggtacaacacatggattataaatatcgatgttaataacatcagaaaatgtaaagtctatacattgttgcatcgtgttaaattttctaatggatctagtattattgggtccaacttctgcctgaaatccaaatatggaagcggatacaaaaccgtttcctggataaaccacacatctccacttttgctttacatcagaaattgtgtcgttgacatcttgaactctcctatctaatgccggtgttccacctatagattttgaatattcgaatgctgcatgagtagcattaaattccttaatattgccataattttcatatattgagtaaccctggataaaaagtaaacacaccgcagccgtcgctaccacaataaaaaaaattgatagagagttcatttataatctattagaagctgacaaaatttttttacacgcatcagacaatgctttaataaatagttcaacatctacttttgtcatatcgaaccgatggtatgattctaacctagaattacatccgaaaaagttgactatgttcatagtcattaagtcattaacaaacaacattccagactctggattataagacgatactgtttcgtcacaattacctaccttaatcatgtgattatgaatattggctattagagcaccttctaagaaatctataatatctttgaaacacgatttaaaatcaaaccacgaatatacttctacgaagaaagttagtttacccataggagagataactataaatggagatctagatacaaaatccggatctatgatagttttaacattattatattctctattaaatacctccacatctaaaaatgttaattttgaaactatgtcttcgtttattaccgtacctgaactaaacgctataagctctattgtttgagaactctttaaacgatattcttgaaatacatgtaacaaagtttcctttaactcggtcggtttatctaccatagttacagaatttgtatccttatctataatataataatcaaaatcgtataaagttatataattatcgcgttcagattgggatcttttcaaatagactaaaaaccccatttctctagtaagtatcttatgtatatgtttgtaaaatatcttcatggtgggaatatgctctaccgcagttatccattcctcattgacagcggtagatgtattagacaaaactattccaatgtttaacaagggccattttacgagattattaaatccttgtttgataaatgtagccaatgagggttcgagttcaacgacgattgaattctcttcccgcggatgctgcatgatgaacgacgggatgttgttcgattgatttggaattctttttcgactttttgtttatattaaatattttaaaatttatagcggatagcaattcatgtaccacggataatgtagacgcgtattgcgcatcgatatctttattattagataaatttatcaataaatgtgagaagtttgcctcgttaaggtcttccatttaaatattatataaacatttgtgtttgtatcttattcgtcttttatggaatagttttttactagtaaagctgcaattacacactttgtccgtaaaacataaatataaacaccagcttttatcaatcgttccaaaaagtcgacggcggacatttttaacatggcatctattttaaatacacttaggtttttggaaaaaacatcattttataattgtaacgattcaataactaaagaaaagattaagattaaacataagggaatgtcatttgtattttataagccaaagcattctaccgttgttaaatacttgtctggaggaggtatatatcatgatgatttggttgtattggggaaggtaacaattaatgatctaaagatgatgctattttacatggatttatcatatcatggagtgacaagtagtggagcaatttacaaattgggatcgtctatcgatagactttctctaaataggactattgttacaaaagttaataattatgatgatacattttttgacgacgatgattgatcgctattgcacaattttgtttttgtactttctaatatagtgtttaggttctttttcatatgagaatattgatttactaaaatatctatgtttaacttttgttctataacgtccttatcggcggtatcggtacatatacgtaattcaccttcacaaaatacggagtcttcgataataatagccaatcgattattggatctagctgtctgtatcatattcaacatgtttaatatatcctttcgtttcccctttacaggcatcgatcgtagcatattttccgcgtctgagatggaaatgttaaaactacaaaaatgcgtaatgttagcccgtcctaatattggtacgtgtctataagtttggcatagtagaataatagacgtgtttaaatgccttccaaagtttaagaattctattagagtattgcattttgatagtttatcgcctacatcatcaaaaataagtaaaaagtgtgctgattttttatgattttgtgcgacagcaatacatttttctatgttacttttagttcgtatcagattatattctagagcttcctgactactaacgaaattaatatgatttggccaaatgtatccatcataatctgggttataaacgggtgtaaacaagaatatatgtttatattttttaactagtgtagaaaacagagatagtaaatagatagtttttccagatccagatcctcccgttaaaaccattctaaacggcatttttaataaattttctcttgaaaattgtttttcttggaaacaattcataattatatttacagttactaaattaatttgataataaatcaaaatatggaaaactaaggtcgttagtagggaggagaacaaagaaggcacatcgtgacataaataacatttattatcatgatgacaccagaaaacgacgaagagcagacatctgtgttctccgctactgtttacggagacaaaattcagggaaagaataaacgcaaacgcgtgattggtctatgtattagaatatctatggttatttcactactatctatgattaccatgtccgcgtttctcatagtgcgcctaaatcaatgcatgtctgctaacgaggctgctattactgacgccgctgttgccgttgctgctgcatcatctactcatagaaaggttgcgtctagcactacacaatatgatcacaaagaaagctgtaatggtttatattaccagggttcttgttatatattacattcagactaccagttattctcggatgctaaagcaaattgcactgcggaatcatcaacactacccaataaatccgatgtcttgattacctggctcattgattatgttgaggatacatggggatctgatggtaatccaattacaaaaactacatccgattatcaagattctgatgtatcacaagaagttagaaagtatttttgtgttaaaacaatgaactaatatttatttttgtacattaataaatgaaatcgcttaatagacaaactgtaagtaggtttaagaagttgtcggtgccggccgctataatgatgatactctcaaccattattagtggcataggaacatttctgcattacaaagaagaactgatgcctagtgcttgcgccaatggatggatacaatacgataaacattgttatttagatactaacattaaaatgtctacagataatgcggtttatcagtgtcgtaaattacgagccagattgcctagaccggatactagacatctgagagtattgtttagtattttttataaagattattgggtaagtttaaaaaagaccaataataaatggttagatattaataatgataaagatatagatattagtaaattaacaaattttaaacaactaaacagtacgacggatgctgaagcgtgttatatatacaagtctggaaaactggttaaaacagtatgtaaaagtactcaatctgtactatgtgttaaaaaattctacaagtgacaacaaaaaatgaattaataataagtcgttaacgtacgccgccatggacgccgcgtttgttattactccaatgggtgtgttgactataacagatacattgtatgatgatctcgatatctcaatcatggactttataggaccatacattataggtaacataaaaactgtccaaatagatgtacgggatataaaatattccgacatgcaaaaatgctactttagctataagggtaaaatagttcctcaggattctaatgatttggctagattcaacatttatagcatttgtgccgcatacagatcaaaaaataccatcatcatagcatgcgactatgatatcatgttagatatagaagataaacatcagccattttatctattcccatctattgatgtttttaacgctacaatcatagaagcgtataacctgtatacagctggagattatcatctaatcatcaatccttcagataatctgaaaatgaaattgtcgtttaattcttcattctgcatatcagacggcaatggatggattataattgatgggaaatgcaatagtaattttttatcataaaagttgtaaagtaaataataaaacaataaatattgaactagtagtacgtatattgagcaatcagaaatgatgctggtacctcttatcacggtgaccgtagttgcgggaacaatattagtatgttatatattatatatttgtaggaaaaagatacgtactgtctataatgacaataaaattatcatgacaaaattaaaaaagataaagagttctaattccagcaaatctagtaaatcaactgatagcgaatcagactgggaggatcactgtagtgctatggaacaaaacaatgacgtagataatatttctaggaatgagatattggacgatgatagcttcgctggtagtttaatatgggataacgaatccaatgttatggcgcctagcacagaacacatttacgatagtgttgctggaagcacgctgctaataaataatgatcgtaatgaacagactatttatcagaacactacagtagtaattaatgaaacggagactgttaaagtacttaatgaagataccaaacagaatcctaactattcatccaatcctttcgtaaattataataaaaccagtatttgtagcaagtcaaatccgtttattacagaacttaacaataaatttagtgagaataatccgtttagacgagcacatagcgatgattatcttaataagcaagaacaagatcatgaacacgatgatatagaatcatcggtcgtatcattggtgtgattagtttcctttttataaaattgaagtaatatttagtattattgctgccgtcacgttgtacaaatggagatattccctgtattcggcatttctaaaattagcaattttattgctaataatgactgtagatattatatagatacagaacatcaaaaaattatatctgatgagatcaatagacagatggatgaaacggtacttcttaccaacatcttaagcgtagaagttgtaaatgacaatgagatgtaccatcttattcctcatagattatcgacgattatactctgtattagttctgtcggaggatgtgttatctctatagataatgacgtcaatggcaaaaatattctaacctttcccattgatcatgctgtaatcatatccccactgagtaaatgtgtcgtagttagcaagggtcctacaaccatattggttgttaaagcggatatacccagcaaacgattggtaacatcgtttacaaacgacatactatatgtaaacaatctgtcactgattaattatttgccgttgtctgtattcattattagacgagttaccgactatttggatagacacatatgcgatcagatatttgcgaataataagtggtattccattataaccatcgacaataagcagtttcctattccatcaaactgtataggtatgtcctctgccaagtacataaattctagcatcgagcaagatactttaatacatgtttgtaacctcgagcatccattcgacttagtatacaaaaaaatgcagtcgtacaattctgtacctatcaaggaacaaatattgtacggtagaattgataatataaatatgagcattagtatttctgtgtattaatagatttctagtatggggatcattaatcatctctaatctctaaatacctcataaaacgaaaaaaaagctattatcaaatactgtacggaatggattcattctcttctctttttatgaaactctgttgtatatctactgataaaactggaagcaaaaaatctgataaaaagaataagaataagatcaaggattatatggaacacgattattataaaataacaatagttcctggttcctcttccacgtctactagctcgtggtattatacacatgcctagtaatagtctctttgcgttgatggaaagcagactagaaataacaggctaaaatgttcagacaccataatagttcccaacccagataataacagagttccatcaacacattcctttaaactcaatcccaaacccaaaaccgttaaaatgtatccggccaattgatagtagataatgaggtgtacagcacatgataatttacacagtaaccaaaatgaaaacactttagtaattataagaaatatagacggtaatgtcatcatcaacaatccgataatatgcctgagagtaaacattgacggataaaacaaaaatgctccgcataactctatcatggcaataacacaaccaaatacttgtaagattcctaaattagtagaaaatacaacggatatcgatgtataagtgatctcgagaaataataagaataaagtaatgcccgtaaagataaacatcaacattgtttggtaatcattaaaccaattagtatgaagttgaactaatttcacagtagattttattccagtattatccccgcatgtatacgtacctggtaagatatctttatattctataatcaatgagacatcactatccgataacgaatgaagtctagcactagtatgccatttacttaatatggtcgtcttggaagttttattataagttaaaatatcatggttatccaatttccatctaatatactttgtcggattatctatagtacacggaataatgatggtatcattacatgctgtatactctatggtctttgtagttgttataacaaccaacgtatagaggtatatcaacgatattctaactcttgacattttttatttatttaaaatgatacctttgttatttattttattctattttgctaacggtattgaatggcataagtttgaaacgagtgaagaaataatttctacttacttattagacgacgtattatacacgggtgttaatggggcggtatacacattttcaaataataaactaaacaaaactggtttaactaataataattatataacaacatctataaaagtagaggatgcggataaggatacattagtatgcggaaccaataacggaaatcccaaatgttggaaaatagacggttcagacgacccaaaacatagaggtagaggatacgctccttatagcaaagtaacgataatcagttacaacgaatgtgtactatctgacataaacatatcaaaagaaggaattaaacgatagagaagatttgacggaccatgtggttatgatttattcacggcggataacgtaattccaaaagatggtttacgaggagcattcgtcgataaagacggtacttatgacaaagtttacattcttttcactgatactatcggctcaaagagaattgttaaaattccgtatataacacaaatgtgcttaaacgacgaaggtggtccatcatcgttgtctagtcatagatggtcgacgtttctcaaagtcgaattagaatgtgacatcgacggaagaagttatagataaattattcattctaaaactataaaaacagataatgatacgatactatatgtattcttcgatagtccgcattatgtacctattctatgaataccattaaacaatctttttctacgtcaaaattggaaggatatacaaagcaattgccgtctccagctcctggtatatgtctaccagctggaaaagttgttccacataccacgtttgaagtcatagaaaaatataatgtactagatgatattataaagcctttatctaaccaacctatcttcgaaggaccgtctggcgttaaatggttcgatataaaggagaaggaaaatgaacatcgggaatatagaatatacttcataaaagaaaattctatatattcattcgatacaaaaactaaacaaactcgcagtgcacaagtcaatgcacaactattttcagtaatggtaactgcgaaaccgttatttatagcagatatagggataggagtaggaatgccacaaatgaaaaaaatacttaaaatgtaatcttaatcgagtacaccacacgacaatgaacaaacataagacagattatgctggttatgcttgctgcgtaatatgcggtctaattgttggaattatttttacagcgacactattaaaagttgtagaacgtaaattagttcatacaccatcaatagataaaacgataaaagatgcatatattagagaagattgtcctactgactggataagctataataataaatgtatccatttatctactgatcgaaaaacctgggaggaaggacgtaatacatgcaaagctctaaatccaaattcggatctaattaagatagagactccaaacgagttaagttttttaagaagcattagacgcggatattgggtaggagaatccgaaatattaaaccagacaaccccatataattttatagctaagaatgccacgaagaatggaaatatatttgtagtacaacgaatactcccaaactgcattcgtgttacactatataacaattacactacatttttatcataccactacttcggttagatgttttagaaaaaaataaatatcgccgtaccgttcttgtttttataaaaataacaattaacaattatcaaattttttctttaatattttacgtggttgaccattcttggtggtaaaataatctcttagtgttggaatggaatgctgtttaatgtttccgcactcatcgtatattttgacgtatgcagtcacatcgtttacgcaatagtcagactgtagttctatcatgcttcctacatcagaaggaggaacagttttaaagtctcttggttttaatctattgccattagttttcatgaaatcctttgttttatccacttcacattttaaataaatgtccactatacattcttttgttaattttactagatcgtcatgggtcatagaatttataggttccgtagtccatggatccaaactagcaaacttcgcgtatacggtatcgcgattagtgtatacaccaactgtatgaaaattaagaaaacagtttaataaatcaacagaaatatttaatcctccgtttgatacagatgcaccatatttatggatttcggattcacacgttgtttgtctgaggtgttcgtctagtgttgcttctacataaacttcgattcccatatattctttattgtcagaatcgcataccgatttatcatcatacactgtttgaaaactaaatggtatacacatcaaaataataaataataacgagtacattctgcaatattgttatcgtaattggaaaaatagtgttcgagtgagttggattatgtgagtattggattgtatattttattttatattttgtaataagaatagaatgctaatgtcaagtttattccaatagatgtcttattaaaaaacatatataataaataacaatggctgaatggcataaaattatcgaggatatctcaaaaaataataagttcgaggatgccgccatcgttgattacaagactacaaagaatgttctagctgctattcctaacagaacatttgccaagattaatccgggtgaaattattcctctcatcactaatcgtaatattctaaaacctcttattggtcagaaatattgtattgtatatactaactctctaatggacgagaacacgtatgctatggagttgcttactgggtacgcccctgtatctccgatcgttatagcgagaactcataccgcacttatatttttgatgggtaagccaacaacatccagacgtgacgtgtatagaacgtgtagagatcacgctacccgtgtacgtgcaactggtaattaaaataaaaagtaatattcatatgtagtgtcaattttaaatgatgatgatgaaatggataatatccatattgacgatgtcaataatgccggtattggcatacagctcatcgatttttagatttcattcagaggatgtggaattatgttatgggcatttgtattttgataggatctataatgtagtaaatataaaatataatccgcatattccatatagatataattttattaatcgcacgttaaccgtagatgaactagacgataatgtcttttttacacatggttattttttaaaacacaaatatggttcacttaatcctagtttgattgtctcattatcaggaaacttaaaatataatgatatacaatgctcagtaaatgtatcgtgtctcattaaaaatttggcaacgagtacatctactatattaacatctaaacataagacttattctctacatcggtccaagtgtattattataataggatatgattctattatatggtataaagatataaatgacaagtataatggcatctatgattttactgcaatatgtatgctaatagcgtctacattgatagtgaccatatacgtgtttaaaaaaataaaaatgaactcttaattatgctatgctattagaaatggataaaatcaaaattacggttgattcaaaaattggtaatgttgttaccatatcgtataacttggaaaagataactattgatgttacaccaaaaaagaaaaggatgtattattagcgcaatcagttgctgtcgaagaggcaaaagatgtcaaggtagaagaaaaaaatattatcgatattgaagatgacgatgatatggatgtagaaagcgcataatacgatctataaaaataagtatataaatactttttatttactgtactcttactgtgtagtggtgataccctactcgattatttttttaaaaaaaaaatacttattctgattcttctaaccatttccgtgttcgttcgaatgccacatcgacgtcaaagataggggagtagttgaaatctagttctgcattgttggtacgcacctcaaatgtagtgttggatatcttcaacgtatagttgttgagtagtgatggttttctaaatagaattctcttcatatcattcttgcacgcgtacatttttagcatccatcttggaatcctagatccttgttctattcccaatggtttcatcaatagaagattaaacatatcgtacgaacacgatggagagtaatcgtagcaaaagtaagcatttcctttaatcttagatcccggatactggatatattttgcagccaacacgtgcatccatgcagcatttcctacatatacccggctatgtaccgcgttatcatcgactgtacgatacataatgttaccgtgttgcttacattgctcgtaaaagactttcgtcaatttgtctccttctccgtaaattccagtgggtcttaggcaacaagtatacaattttgctccattcatgattacggaattattggctttcataaccagttgctcggccatacgtttactttttgcgtatacatgtcctggtgatatatcataaagggtatgctcatggccgatgaatggatcaccgtgtttattgggtcctattgcttccatgctactagtatagatcaaatacttgattcctaggtccacacaagctgccaaaatagtctgtgttccataatagtttactttcatgatttcattatcggtgtattttccaaatacatccactagagcagctgtatgaataatcagatttaccccatttagcgcttctctcaccttatcaaagtcgtttatatcacattgtatatagtttataaccttaactttcgaggttattggttgtggatcttctacaatatctatgactctgatttcttgaacatcatctgcactaattaacagttttactatatacctgcctagaaatccggcaccaccagtaaccgcgtacacggccattgctgccacttataatatcaaactacttattctattttactaaataatggctgtttgtataataaaccacgataatatcagaggagttatttactttgaaccagttcatggaaaagataaagttttaggatcagttattggattaaaatccggaacgtatagtttgataattcatcgttacggagatattagtcaaggatgtgattccataggcagtccagaaatatttatcggtaacatctttgtaaacagatatggtgtagcatatgtttatttagatacagatgtaaatatatttacaattattggaaaggcgttatctatttcaaaaaatgatcagagattagcgtgtggagttattggtatttcttacataaatgaaaagataatacattttcttacaattaacgagaatggcgtttgatatatcagttaatgcgtctaaaacaataaatgcattagtttacttttctactcagcaaaataaattagtcatacgtaatgaagttaatgatacacactacactgtcgaatttgatagggacaaagtagttgacacgtttatttcatataatagacataatgactccatagagataagaggggtgcttccagaggaaactaatattggttgcgcggttaatacgccggttagtatgacttacttgtataataagtatagttttaaactgattttagcagaatatataagacacagaaatactatatccggcaatatttattcggcattgatgacactagatgatttggctattaaacagtatggagacattgatctattatttaatgagaaacttaaagtagactccgattcgggactatttgactttgtcaactttgtaaaggatatgatatgttgtgattctagaatagtagtagctctatctagtctagtatctaaacattgggaattgacaaataaaaagtataggtgtatggcattagccgaacatatatctgatagtattccaatatctgagctatctagactacgatacaatctatgtaagtatctacgcgggcacactgagagcatagaggataaatttgattattttgaagacgatgattcgtctacatgttctgccgtaaccgacagggaaacggatgtataattttagggataacagggtaat

SEQ ID NO: 32 - DNA, 28837 bp, Vaccinia virus
tagggataacagggtaattacttattctgattcttctaaccatttccgtgttcgttcgaatgccacatcgacgtcaaagataggggagtagttgaaatctagttctgcattgttggtacgcacctcaaatgtagtgttggatatcttcaacgtatagttgttgagtagtgatggttttctaaatagaattctcttcatatcattcttgcacgcgtacatttttagcatccatcttggaatcctagatccttgttctattcccaatggtttcatcaatagaagattaaacatatcgtacgaacacgatggagagtaatcgtagcaaaagtaagcatttcctttaatcttagatcccggatactggatatattttgcagccaacacgtgcatccatgcagcatttcctacatatacccggctatgtaccgcgttatcatcgactgtacgatacataatgttaccgtgttgcttacattgctcgtaaaagactttcgtcaatttgtctccttctccgtaaattccagtgggtcttaggcaacaagtatacaattttgctccattcatgattacggaattattggctttcataaccagttgctcggccatacgtttactttttgcgtatacatgtcctggtgatatatcataaagggtatgctcatggccgatgaatggatcaccgtgtttattgggtcctattgcttccatgctactagtatagatcaaatacttgattcctaggtccacacaagctgccaaaatagtctgtgttccataatagtttactttcatgatttcattatcggtgtattttccaaatacatccactagagcagctgtatgaataatcagatttaccccatttagcgcttctctcaccttatcaaagtcgtttatatcacattgtatatagtttataaccttaactttcgaggttattggttgtggatcttctacaatatctatgactctgatttcttgaacatcatctgcactaattaacagttttactatatacctgcctagaaatccggcaccaccagtaaccgcgtacacggccattgctgccacttataatatcaaactacttattctattttactaaataatggctgtttgtataataaaccacgataatatcagaggagttatttactttgaaccagttcatggaaaagataaagttttaggatcagttattggattaaaatccggaacgtatagtttgataattcatcgttacggagatattagtcaaggatgtgattccataggcagtccagaaatatttatcggtaacatctttgtaaacagatatggtgtagcatatgtttatttagatacagatgtaaatatatttacaattattggaaaggcgttatctatttcaaaaaatgatcagagattagcgtgtggagttattggtatttcttacataaatgaaaagataatacattttcttacaattaacgagaatggcgtttgatatatcagttaatgcgtctaaaacaataaatgcattagtttacttttctactcagcaaaataaattagtcatacgtaatgaagttaatgatacacactacactgtcgaatttgatagggacaaagtagttgacacgtttatttcatataatagacataatgactccatagagataagaggggtgcttccagaggaaactaatattggttgcgcggttaatacgccggttagtatgacttacttgtataataagtatagttttaaactgattttagcagaatatataagacacagaaatactatatccggcaatatttattcggcattgatgacactagatgatttggctattaaacagtatggagacattgatctattatttaatgagaaacttaaagtagactccgattcgggactatttgactttgtcaactttgtaaaggatatgatatgttgtgattctagaatagtagtagctctatctagtctagtatctaaacattgggaattgacaaataaaaagtataggtgtatggcattagccgaacatatatctgatagtattccaatatctgagctatctagactacgatacaatctatgtaagtatctacgcgggcacactgagagcatagaggataaatttgattattttgaagacgatgattcgtctacatgttctgccgtaaccgacagggaaacggatgtataattttttttatagcgtgaaggatatgataaaaaatataattgttgtatttatcccattccaatcaccttatatgattctgtaaaaaaattatactgtaacacaataaaggagtcttatagatgtatagaggtcagatactggtttgataaactgtttattccacataagtatgtttgactttatggttagacccgcatactttaacaaatcactgaaaattggagttaggtattgacctctcagaatcagttgccgttctggaacattaaatgtattttttatgatatactccaacgcatttatgtgggcatacaacaagtcattactaatggagtattccaagagttttagttgtctagtatttaacaagagaagagatttcaacagactgtttatgaactcgaatgccgcctcattgtcgcttatattgatgatgtcgaattctcccaatatcatcaccgatgagtagctcatcttgttatcgggatccaagttttctaaagatgtcattaaaccctcgatcatgaatggatttatcatcatcgtttttatgttggacatgagcttagtccgtttgtccacatctatagaagatgatttctgaattatttcatatatctctctctttaactccaggaacttgtcaggatggtctactttaatatgttctcgtctaagagatgaaaatctttggatggttgcacgcgacttttctctaaaggatgacgttgcccaagatcctctcttaaatgaatccatcttatccttggacaagatggacagtctattttccttagatggtttaatatttttgttacccatgatctataaaggtagacctaatcgtctcggatgaccatatatttattttcagttttattatacgcataaattgtaaaaaatatgttaggtttacgaaaatgtctcgtggggcattaatcgtttttgaaggattggacaaatctggaaaaacaacacaatgtatgaacatcatggaatctataccggcaaacacgataaaatatcttaactttcctcagagatccactgtcactggaaagatgatagatgactatctaactcgtaaaaaaacctataatgatcatatagttaatctattattttgtgcaaatagatgggagtttgcatcttttatacaagaacaactagaacagggaattactttaatagttgatagatacgcattctctggagtagcgtatgccgccgctaaaggcgcgtcaatgactctcagtaagagttatgaatctggattgcctaaacccgacttagttatattcttggaatctggtagcaaagaaattaatagaaacgtcggcgaggaaatttatgaagatgttacattccaacaaaaggtattacaagaatataaaaaaatgattgaagaaggagatattcattggcaaattatttcttctgaattcgaggaagatgtaaagaaggagttgattaagaatatagttatagaggctatacacacggttactggaccagtggggcaactgtggatgtaatagtgaaattacattttttataaatagatgttagtacagtgttataaatggatgaagcatattactctggcaacttggaatcagtactcggatacgtgtccgatatgcataccgaactcgcatcaatatctcaattagttattgccaagatagaaactatagataatgatatattaaacaaggacattgtaaattttatcatgtgtagatcaaacttggataatccatttatctctttcctagatactgtatatactattatagatcaagagatctatcagaccgaattgattaattcattagacgacaatgaaattatcgattgtatagttaataagtttatgagcttttataaggataacctagaaaatatagtagatgctatcattactctaaaatatataatgaataatccagattttaaaactacgtatgcagaagtactcggttccagaatagcggatatagatattaaacaagtgatacgtgagaatatactacaattgtctaataatatccgcgaacgatatttgtgaaaatattaaaaaaaaatactttttttattaaatgacgtcttttcgtgaatttagaaaattatgctgtgctatatatcacgcatcaggatataaagaaaaatctaaattaattagagactttataacagatagggatgataaatatttgatcattaagctattgcttcccggattagacgatagaatttataacatgaacgataaacaaattataaaattatatagtataatatttaaacaatctcaggaagatatgctacaagatttaggatacggatatataggagacactattagtacattcttcaaagaaaacacagaaatccgtccaagagataaaagcattttaactttagaagacgtggatagtttcttaactacgttatcatccgtaactaaagaattgcatcaaataaaattattgactgatgtagcatctgtttgtacatgtaatgatttaaaatgtgtagtcatgcttattgataaagatctaaaaattaaagcgggccctcggtacgtacttaacgctattagtcctcatgcctatgatgtttttagaaaatctaataacttgaaagagataatagaaaatgcatctaaacaaaatctagactctatatctatttctgttatgactccaattaatcccatgttagcggaatcgtgtgattctgtcaataaggcgtttaaaaaatttccatcaggaatgtttgcggaagttaaatacgatggtgaaagagtacaagttcataaaaataataacgagtttgccttctttagtagaaacatgaaaccagtactctctcataaagtggattatctcaaagaatacataccgaaagcatttaaaaaagctacgtctatcgtattggattctgaaattgttcttgtagacgaacataatgtaccgctcccgtttggaagtttaggtatacacaaaaagaaagaatataaaaactctaacatgtgtttgttcgtgtttgactgtttgtactttgatggattcgatatgacggacattccattgtacgaacgaagatcttttctcaaagatgttatggttgaaatacccaatagaatagtattctcagagttgacgaatattagtaacgagtctcagttaactgacgtattggatgatgcactaacgagaaaattagaaggattggtcttaaaagatattaatggagtatacgaaccgggaaagagaagatggttaaaaataaagcgagactatttgaacgagggttccatggcagattctgccgatttagtagtactaggtgcttactatggtaaaggagcaaagggtggtatcatggcagtctttctaatgggttgttacgacgataaatccggtaaatggaagacggttaccaagtgttcaggacacgatgataatacgttaagggagttgcaagaccaattaaagatgattaaaattaacaaggatcccaaaaaaattccagagtggttggtagttaataaaatctatattcccgattttgtagtagaggatccaaaacaatctcagatatgggaaatttcaggagcagagtttacatcttccaagtcacatacagcgaatggaatatcgattagatttcctagatttactaggataagagaggataaaacgtggaaagaatctactcatctaaacgatttagtaaacttgactaaatcttaatagttacatacaaactgaaaattaaaataacaccatttagttggtggtcgccatggatggtgttattgtatactgtctaaacgcgttagtaaaacatggcgaggaaataaatcatataaaaaatgatttcatgattaaaccatgttgtgaaaaagttaagaacgttcacatcgacggacaatctaaaaacaatacagtgattgcagatttgccatatctggataatgctgtatcggatgtatgcaaatcgatatatatatagtatcaagaatatccagatttgctaatttgataaagatagatgacgatgacaagactcctactggtgtatataattattttaaacctaaagatgccattcctgttattatatccataggaaaggatagagatgtttgtgaactattaatctcatctgataaagcgtgtgcgtgtatagagttaaattcatataaagtagccattcttcccatggatgtttccttttttaccaaaggaaatgcatcattgattattctcctgtttgatttctctatcgatgcggcacctctcttaagaagtgtaaccgataataatgttattatatctagacaccagcgtctacatgacgagcttccgagttccaattggttcaagttttacataagtataaagtccgactattgttctatattatatatggttgttgatggatctgtgatgcatgcgatagctgataatagaacttacgcaaatattagcaaaaatatattagacaatactacaattaacgatgagtgtagatgctgttattttgaaccacagattaggattcttgatagagatgagatgctcaatggatcatcgtgtgatatgaacagacattgtattatgatgaatttacctgatgtaggcaaatttggatctagtatgttggggaaatatgaacctgacatgattaagattgctcttttggtggctggtaatttaataagaaatcgagactacattcccgggagacgaggatatagctactacgtttacggtatagcctctagataatttttttaagcacgaaataaaaaacataattttaaaccaatctatttcatactattttgtgtgatcaccatggacataaagatagatattagtatttttggtgataaatttacggtgactactaggagggaaaatgaagaaaaaaaaaaatatctacctctccaaaaagaaaaaactactgatgttatcaaacctgattatcttgagtacgatgacttgttagatagagatgagatgtttactattctagaggaatattttatgtacagaggtctattaggcctcagaataaaatatggacgactctttaacgaaattaaaaaattcgacaatgatgcggaagaacaattcggtactatagaagaactcaagcagaaacttagattaaattctgaagagggagcagataactttatagattatataaaggtacaaaaacaggatatcgtcaaacttactgtatacgattgcatatctatgataggattgtgtgcatgcgtggtagatgtttggagaaatgagaaactgttttctagatggaaatattgtttacgagcgattaaactgtttattaatgatcacatgcttgataagataaaatctatactgcagaatagactagtgtatgtggaaatgtcatagaaagttaaaagttaatgagagcaaaaatatataaggttgtattccatatttgttattttttctgtaatagttaaaaaatacattcgatggtctatctatcagattattatgtgttataaggtactttttctcataataaactagagtatgagtaagatagtgtttttcaaaacatataaatctaaaattgatggatgagatatacagctattaatttcgaaaatatattttaatctgataactttaaacatggatttttgatggtggtttaaagtttaaaaaaaagattttgttattgtagtatatgataatatcaaaaagatggatataaagaatttgctgactgtatgtactattttttacattactacattggctacggcagatatacctacttcgtcactgccacacgctccggtaaacggggcatgtgacgagggagaatatcttgataagaggcataatcaatgttgtaatcagtgtccacctggagaatttgccaaggtcagatgtagtggtagtgataacacaaaatgtgaacgctgcccacctcatacatataccgcaatccccaattactctaatggatgtcatcaatgtagaaaatgcccaacaggatcatttgataaggtaaagtgtaccggaacacagaacagtaaatgttcgtgtcttcctggttggtattgcgctactgattcttcacagactgaagattgttgaaattgtgtaccaaaaaggagatgtccatgcggatactttggtggaatagatgaacaaggaaatcctatttgtaaatcgtgctgtattggtgaatattgcaactacctacgtaattatagacttgatccattttctccatgcaaactatctaaatgtaattaattatgattttgatgataatgttaccatacattatatcgctacttggttagtgtattattcagtatgaagacctattaataattacttatcttttgacgatcttgttataattataatataaaaacttatggcatagtaacttataattgctaacacgataaattcgtaataatctgttttgttcaaatttttataaggaatctacaggcataaaaataaaaatataatttataatatactcttacaacgccatcatgaatagcagcagtaaattaattgctgttattaatggatttagaaatagtggacgattttgtgatattaatatagttattaatgatgaaaggataaacgctcataaactcatcctatctggagcctccgaatatttttccattctgttttccaataattttatcgattctaatgaatacgaagttaatctaagtcatttagattatcaaagcgtaaacgatttgatcgattatatttatgggatacctttgagcctaactaacgataacgtgaaatatattctttcaaccgctgattttttacaaattggatctgctattacggagtgtgaaaattacatacttaaaaatctttgttctaaaaactgtatcgatttctacatatacgctgataaatataataacaagaaaatagaatcagcgtcgtttaacacaatattacaaaatattttgagactcatcaacgatgaaaactttaaatacttaacagaggaatcaatgataaaaattttaagcgatgatatgttaaatataaaaaatgaggatttcgccccactaattctcattaaatggttagagagtactcaacaatcatgcaccgtcgagttacttaaatgcctcagaatatcattgctttccccacaagttataaaatcactttatagtcatcaactggttagttcaatctacgaatgtataacattcttaaacaatatagcattcttggatgaatcatttcctagataccatagcatcgagttgatatctatcggtataagtaattcgcgtgataaaatttccataaactgctacaatcataaaaaaaatacatgggaaatgatatcttcacgtagatataggtgtagtttcgcagtggccgtcctggataatattatctatatgatgggtggatatgatcagtccccgtatagaagttcaaaggttatagcgtacaatacatgtacaaattcttggatatatgatataccagagctaaaatatcctcgttctaattgtgggggactggctgatgacgaatacatttattgtataggcggcatacgcgatcaggattcatcgttgacatctagtattgatagatggaagccatcaaaaccatattggcagaagtatgctaaaatgcgcgaaccaaaatgtgatatgggggttgcgatgttaaacggattaatatatgtcatgggtggaatcgttaaaggtgacacgtgtaccgacgcactagagagtttatcagaagatggatggatgaagcatcaacgtcttccaataaaaatgtccaatatgtcgacgattgttcatgatggcaagatttatatatctggaggttacaacaatagtagtgtagttaatgtaatatcgaatctagtccttagctataattcgatatatgatgaatggaccaaattatcatcattaaatattcctagaattaatcccgctctatggtcagcgcataataaattatatgtaggaggaggaatatctgatgatgttcaaactaatacatctgaaacatacgataaagaaaaagattgttggacattggataatggtcacgtgttaccacgcaattatataatgtataaatgcgaaccgattaaacataaatatccattggaaaaaacacagtacacgaatgattttctaaagtatttggaaagttttataggtagttgatagaacaaaatacataattttgtaaaaataaatcactttttatactaatatgacacgattaccaatacttttgttactaatatcattagtatacgctacaccttttcctcagacatctaaaaaaataggtgatgatgcaactctatcatgtaatcgaaataatacaaatgactacgttgttatgagtgcttggtataaggagcccaattctattattcttttagctgctaaaagcgacgtcttgtattttgataattataccaaggataaaatatcttacgactctccatacgatgatctagttacaactatcacaattaaatcattgactgctagagatgccggtacttatgtatgtgcattctttatgacatcaactacaaatgacactgataaagtagattatgaagaatactccacagagttgattgtaaatacagatagtgaatcgactatagacataatactatctggatctacacattcaccggaaactagttctgagaaacctgattatatagataattctaattgctcgtcggtattcgaaatcgcgactccggaaccaattactgataatgtagaagatcatacagacaccgtcacatacactagtgatagcattaatacagtaagtgcaacatctggagaatccacaacagacgagactccggaaccaattactgataaagaagatcatacagttacagacactgtctcatacactacagtaagtacatcatctggaattgtcactactaaatcaaccaccgatgatacgtacaatgataatgatacagtaccaccaactactgtaggcggtagtacaacctctattagcaattataaaaccaaggactttgtagaaatatttggtattaccgcattaattatattgtcggccgtggcaatattctgtattacgtattatatatgtaataaacgttcacgtaaatacaaaacagagaacaaagtctagatttttgacttacataaatgtctgggatagtaaaatctatcatattgagcggaccatctggttcaggaaagacagccatagccaaaagactatgggaatatatttggatttgtggtgtcccataccactagatttcctcgtcctatggaacgagaaggtgtcgattaccattacgttaacagagaggccatctggaagggaatagccgccggaaactttctagaacatactgagtttttaggaaatatttacggaacttctaaaacagctgtgaatacagcggctattaataatcgtatttgtgtgatggatctaaacatcgatggcgttagaagtcttaaaaatacgtacctaatgccttactcggtgtatataagacctacctctcttaaaatggttgaaaccaagcttcgttgtagaaacactgaagctaacgatgagattcatcgtcgcgtgatattggcaaaaacggatatggatgaggccaacgaagcaggtctattcgacactattattattgaagatgatgtgaatttagcatatagtaagttaattcagatactacaggaccgtattagaatgtattttaacactaattaaagacttaagacttaaaacttgataattaataatataactcgtttttatatgtgtctatttcaacgtctaatgtattagttaaatattaaaacttaccacgtaaaacttaaaatttaaaatggtatttcattgacagatagatcacacattatgaactttcaaggacttgtgttaactgacaattgcaaaaatcaatgggtcgttggaccattaataggaaaaggtggatttggtagtatttatactactaatgacaataattatgtagtaaaaatagagcccaaagctaacggatcattatttaccgaacaggcattttatactagagtacttaaaccatccgttatcgaagaatggaaaaaatctcacaatataaagcacgtaggtcttatcacgtgcaaggcatttggtctatacaaatccattaatgtggaatatcgattcttggtaattaatagattaggtgcagatctagatgcggtgatcagagccaataataatagattaccaaaaaggtcggtgatgttgatcggaatcgaaatcttaaataccatacaatttatgcacgagcaaggatattctcacggagatattaaagcgagtaatatagtcttagatcaaatagataagaataaattatatctagtggattacggattggtttctaaattcatgtctaatggcgaacatgttccatttataagaaatccaaataaaatggataacggtactctagaatttacacctatagattcgcataaaggatacgttgtatctagacgtggagatctagaaacacttggatattgtatgattagatggttgggaggtatcttgccatggactaagatatctgaaacaaagaattgtgcattagtaagtgccacaaaacagaaatatgttaacaatactgcgactttgttaatgaccagtttgcaatatgcacctagagaattgctgcaatatattaccatggtaaactctttgacatattttgaggaacccaattacgacgagtttcggcacatattaatgcagggtgtatattattaagtgtggtgtttggtcgatgtaaaatttttgtcgataaaaattaaaaaataacttaatttattattgatctcgtgtgtacaaccgaaatcatggcgatgttttacgcacacgctctcggtgggtacgacgagaatcttcatgcctttcctggaatatcatcgactgttgccaatgatgtcaggaaatattctgttgtgtcagtttataataacaagtatgacattgtaaaagacaaatatatgtggtgttacagtcaggtgaacaagagatatattggagcactgctgcctatgtttgagtgcaatgaatatctacaaattggagatccgatccatgatcaagaaggaaatcaaatctctatcatcacatatcgccacaaaaactactatgctctaagcggaatcgggtacgagagtctagacttgtgtttggaaggagtagggattcatcatcacgtacttgaagcaggaaacgctgtatatggaaaagttcaacatgattattctactatcaaagagaaggccaaagaaatgagtacacttagtccaggacctataattgattaccacgtctggataggagattgtatctgtcaagttactgctgtggacgtacatggaaaggaaattatgaaaatgagattcaaaaagggtgcggtgcttccgatcccaaatctggtaaaagttaaacttggggagaatgatacagaaaatctttcttctactatatcggcggcaccatcgaggtaaccacctctctggaagacagcgtgaataatgtactcatgaaacgtttggaaactatacgccatatgtggtctgttgtatatgatcattttaatattgtgaatggtaaagaatgctgttatgtgcatacgcatttgtctaatcaaaatcttataccgagtactgtaaaaacaaatttgtacatgaagactatgggatcatgcattcaaatggattccatggaagctctagagtatcttagcgaactgaaggaatcaggtggatggagtcccagaccagaaatgcaggaatttgaatatccagatggagtggaagacactgaatcaattgagagattggcagaggagttcttcaatagatcagaacttcaggctggtaaatcagttaaatttggtaattctattaattgttaaacatatacatctgtttcagctaagcaactaagaacacgtatacggcagcagcttccttctatactctcatcttttaccaagggtggatatttgttcattggagttgataataatacacacaaagtaattggattcacggtgggttacgactacctcagactggtagagaatgatatagaaaagcatatcaaaagactttgtgttgtgtatttctgtgagaagaaagaggacatcaagtacacgtgtcgattcatcaaggtatataaacctggggatgagactacctcgacatacgtgtgcgctatcaaagtggaaagatgctgttgtgctgtgtttgcagattggccagaatcatggtatatggatactaatggtatcaataagtattctccagatgaatgggtgtcacatataaaattttaattaatgtaatagagaacaaataataaggttgtaatatcatatagacaataactaacaattaattagtaactgttatctcttttttaactaaccaactaactatatacctattaatacatcgtaattatagttcttaacatctattaatcattaattcgcttctttaattttttataaactaacattgttaattgaaaagggataacatgttacagaatataaattatatatggatttttttaaaaaggaaatacttgactggagtatatatttatctcttcattatatagcacgcgtgttttccaatttttccacatcccatataatacaggattataatctcgttcgaacatacgagaaagtggataaaacaatagttgattttttatctaggttgccaaatttattccatattttagaatatggggaaaatattctacatatttattctatggatgatgctaatacgaatattataattttttttctagatagagtattaaatattaataagaacgggtcatttatacacaatctcgggttatcatcatccattaatataaaagaatatgtatatcaattagttaataatgatcatccagataataggataagactaatgcttgaaaatggacgtagaacaagacattttttgtcctatatatcagatacagttaatatctatatatgtattttaataaatcatggattttatatagatgccgaagacagttacggttgtacattattacatagatgtatatatcactataagaaatcagaatcagaatcatacaatgaattaattaagatattgttaaataatggatccgatgtagataaaaaagatacgtacggaaacacaccttttatcctattatgtaaacacgatatcaacaacgtggaattgtttgagatatgtttagagaatgctaatatagactctgtagactttaatagatatacacctcttcattatgtctcatgtcgtaataaatatgattttgtaaagttattaatttctaaaggagcaaatgttaatgcgcgtaataaattcggaactactccattttattgtggaattatacacggtatctcgcttataaaactatatttggaatcagacacagagttagaaatagataatgaacatatagttcgtcatttaataatttttgatgctgttgaatctttagattatctattatccagaggagttattgatattaactatcgtactatatacaacgaaacatctatttacgacgctgtcagttataatgcgtataatacgttggtctatctattaaacagaaatggtgattttgagacgattactactagtggatgtacatgtatttcggaagcagtcgcaaacaacaacaaaataataatggaagtactattgtctaaacgaccatctttgaaaattatgatacagtctatgatagcaattactaaacataaacagcataatgcagatttattgaaaatgtgtataaaatatactgcgtgtatgaccgattatgatactcttatagatgtacagtcgctacagcaatataaatggtatattttaagatgtttcgatgaaatagatatcatgaagagatgttatataaaaaataaaactgtattccaattagttttttgtatcaaagacattaatactttaatgagatacggtaaacatccttctttcgtgaaatgcactagtctcgacgtatacggaagtcgtgtacgtaatatcatagcatctattagatatcgtcagagattaattagtctattatccaagaagctggatgcgggagataaatggtcgtgttttcctaacgaaataaaatataaaatattggaaaactttaacgataacgaactgtccacatatctaaaaatcttataaacattattaaaatataaaatctaagtaggataaaatcacactacatcattgtttccttttagtgctcgacagtgtatactatttttaacactcataaataaaaatgaaaacgatttccgttgttacgttgttatgcgtactacctgctgttgtttattcaacatgtactgtacccactatgaataacgctaaattaacgtctaccgaaacatcgtttaataataaccagaaagttacatttacatgtgatcagggatatcattctttggatccaaatgctgtctgcgaaacagataaatggaaatacgaaaatccatgcaagaaaatgtgcacagtttctgattatgtctctgaactatataataaaccgctatacgaagtgaattccaccatgacactaagttgcaacggcgaaacaaaatattttcgttgcgaagaaaaaaatggaaatacttcttggaatgatactgttacgtgtcctaatgcggaatgtcaacctcttcaattagaacacggatcgtgtcaaccagttaaagaaaaatactcatttggggaatatataactatcaactgtgatgttggatatgaggttattggtgcttcgtacataagttgtacagctaattcttggaatgttattccatcatgtcaacaaaaatgtgatataccgtctctatctaatggattaatttccggatctacattttctatcggtggcgttatacatcttagttgtaaaagtggttttatactaacgggatctccatcatccacatgtatcgacggtaaatggaatcccatactcccaacatgtgtacgatctaacgaaaaatttgatccagtggatgatggtcccgacgatgagacagatttgagcaaactctcgaaagacgttgtacaatatgaacaagaaatagaatcgttagaagcaacttatcatataatcatagtggcgttaacaattatgggcgtcatatttttaatctccgttatagtattagtttgttcctgtgacaaaaataatgaccaatataagttccataaattgctaccgtaaatataaatccgttaaaataattaataattaataacgaacaagtatcaaaagattaaagaattatagctagaatcaattgagatgtcttcttcagtggatgttgatatctacgatgccgttagagcatttttactcaggcactattataacaagagatttattgtgtatggaagaagtaacgccatattacataatatatacaggctatttacaagatgcgccgttataccgttcgatgatatagtacgtactatgccaaatgaatcacgtgttaaacaatgggtgatggatacacttaatggtataatgatgaatgaacgcgatattactgtatgtgtgggcaccggaatactattcatggaaatgtttttcgattacaataaaaatagtatcaacaatcaactaatgtatgatataattaatagcgtatctataattctagctaatgagagatatagaagcgcttttaacgacgatggtatatacatccgtagaaatatgattaacaagttgtacggatacgcatctctaactactattggcacgatcgctggaggtgtttgttattatctgttgatgcatctagttagtttgtataaataattatttcaatatactagttaaaattttaagattttaaatgtataaaaaactaataacgtttttatttgtaataggtgcagtagcatcctattcgaataatgagtacactccgtttaataaactgagtgtaaaactctatatagatggagtagataatatagaaaattcatatactgatgataataatgaattggtgttaaattttaaagagtacacaatttctattattacagagtcatgcgacgtcggatttgattccatagatatagatgttataaacgactataaaattattgatatgtataccattgactcgtctactattcaacgcagaggtcacacgtgtagaatatctaccaaattatcatgccattatgataagtacccttatattcacaaatatgatggtgatgagcgacaatattctattactgcagagggaaaatgctataaaggaataaaatatgaaataagtatgatcaacgatgatactctattgagaaaacatactcttaaaattggatctacttatatatttgatcgtcatggacatagtaatacatattattcaaaatatgatttttaaaaatttaaaatatattatcacttcagtgacagtagtcaaataacaaacaacaccatgagatatattataattctcgcagttttgttcattaatagtatacatgctaaaataactagttataagtttgaatccgtcaattttgattccaaaattgaatggactggggatggtctatacaatatatcccttaaaaattatggcatcaagacgtggcaaacaatgtatacaaatgtaccagaaggaacatacgacatatccgcatttccaaagaatgatttcgtatctttctgggttaaatttgaacaaggcgattataaagtggaagagtattgtacgggactatgcgtcgaagtaaaaattggaccaccgactgtaacattaactgaatacgacgaccatatcaatttgtacatcgagcatccgtatgctactagaggtagcaaaaagattcctatttacaaacgcggtgacatgtgtgatatctacttgttgtatacggctaacttcacattcggagattctaaagaaccagtaccatatgatatcgatgactacgattgcacgtctacaggttgcagcatagactttgtcacaacagaaaaagtgtgcgtgacagcacagggagccacagaagggtttctcgaaaaaattactccatggagttcggaagtatgtctgacacctaaaaagagtgtatatacatgcgcaattagatccaaagaagatgttcccaatttcaaggacaaaatggccagagttatcaagagaaaatttaataaacagtctcaatcttatttaactaaatttctcggtagcacatcaaatgatgttaccacttttcttagcatgcttaacttgactaaatattcataactaatttttattaatgatacaaaaacgaaataaaactgcatattatacactggttaacgcccttataggctctaaccattttcaagatgaggtccctgattatagtccttctgttcccctctatcatctactccatgtctattagacgatgtgagaagactgaagaggaaacatggggattgaaaatagggttgtgtataattgccaaagatttttatcccgaaagaactgattgcagtgttcatctcccaactgcaagtgaaggattgataactgaaggcaatggattcagggatatacgaaacaccgataaattataaaaaaagcaatgtgtccgctgtttccgttaataatactattttcgtaactggcggattattcataaataactctaatagcacgatcgtggttaacaatatggaaaaacttgacatttataaagacaaacaatggtcgattatagaaatgcctatggctagggtatatcacggcatcgactcgacatttggaatgttatattttgccggaggtctatccgttaccgaacaatatggtaatttagagaaaaacaacgagatatcttgttacaatcctagaacgaataagtggtttgatatttcatatactatttataagatatccatatcatcattgtgtaaactaaataacgtcttctatgtatttagtaaggacattggatatgtggaaaagtatgatggtgcatggaagttagtacatgatcgtctccccgctataaaggcattatcaacttctccttattgattgaaaatgaaaatataaatagtttttatgtatagcagtattaccctatagttttattgcttactactaacatggatacagatgttacaaatgtagaagatatcataaatgaaatagatagagagaaagaagaaatactaaaaaatgtagaaattgaaaataataaaaacattaacaagaatcatcccaatgaatatattagagaagcactcgttattaataccagtagtaatagtgattccattgataaagaagttatagaatgtatctgtcacgatgtaggaatatagatcatatctactaatttttataatcgatacaaaacataaaaaacaactcgttattacatagcaggcatggaatccttcaagtattgttttgataacgatggcaagaaatggattatcggaaatactttatattctggtaattcaatactatataaggtcagaaaaaatttcactagttcgttctacaattacgtaatgaagatagatcacaaatcacacaagccattgttgtctgaaatacgattctatatatctgtattggatcctttgactatcgacaactggacacgggaacgtggtataaagtatttggctattccagatctgtatggaattggagaaaccgatgattatatgttcttcgttataaaaaattcgggaagagtattcgccccaaaggatactgaatcagtcttcgaagcatgtgtcactatgataaacacgttagagtttatacactctcgaggatttacccatggaaaaatagaaccgaggaatatactgattagaaataaacgtctttcactaattgactattctagaactaacaaactatacaagagtggaaactcacatatagattacaacgaggacatgataacttcaggaaatatcaattatatgtgtgtagacaatcatcttggagcaacagtttcaaaacgaggagatttagaaatgttgggatattgcatgatagaatggttcggtggcaaacttccatggaaaaacgaaagtagtataaaagtaataaaacaaaaaaaagaatataaaaaatttatagctactttctttgaggactgttttcctgaaggaaatgaacctctggaattagttagatatatagaattagtatacacgttagattattctcaaactcctaattatgacagactacgtaaactgtttatacaagattgaaattatattctttttttatagagtgtggtagtgttacggatatctaatattaatattagactatctctatcgcgctacacgaccaatatcgattactatggatatcttcagggaaatcgcatcttctatgaaaggagagaatgtatttatttctccagcgtcaatctcgtcagtattgacaatactgtattatggagctaatggatccactgctgaacagctatcaaaatatgtagaaacggaggagaacacggataaggttagcgctcagaatatctcattcaaatccatgaataaagtatatgggcgatattctgccgtgtttaaagattcctttttgagaaaaattggcgataagtttcaaactgttgacttcactgattgtcgcactatagatgcaatcaacaagtgtgtagatatctttactgaggggaaaatcaatccactattggatgaaccattgtctcctagcaattagtgccgtatactttaaagcaaaatggttgacgccattcgaaaaggaatttaccagtgattatcccttttacgtatctccgacggaaatggtagatgtaagtatgatgtctatgtacggcaaggcatttaatcacgcatctgtaaaggaatcattcggcaacttttcaatcatagaactgccatatgttggagatactagtatgatggtcattcttccagacaagattgatggattagaatccatagaacaaaatctaacagatacaaattttaagaaatggtgtgactttatggatgctatgtttatagatgttcacattcccaagtttaaggtaacaggctcgtataatctggtggatactctagtaaagtcaggactgacagaggtgttcggttcaactggagattatagcaatatgtgtaattcagatgtgagtgtcgacgctatgatccacaaaacgtatatagatgtcaatgaagagtatacagaagcagctgcagcaacttgtgcactggtgtcagactgtgcatcaacaattacaaatgagttctgtgtagatcatccgttcatctatgtgattaggcatgttgatggcaaaattcttttcgttggtagatattgctctccaacaactaattgttaaccattttttttaaaaaaatagaaaaaacatgtggtattagtgcaggtcgttattcttccaattgcaattggtaagatgacggccaactttagtacccacgtcttttcaccacagcactgtggatgtgacagactgaccagtattgatgacgtcaaacaatgtttgactgaatatatttattggtcgtcctatgcataccgcaacaggcaatgcgctggacagttgtattccacactcctctcttttagagatgatgcggaattagtgttcatcgacattcgcgagctggtaaaacatatgccgtgggatgatgtcaaagattgtgcagaaatcatccgttgttatataccggatgagcaaaaaaccatcagagagatttcggccatcatcggactttgtgcatatgctgctacttactggggaggtgaagaccatcccactagtaacagtctgaacgcattgtttgtgatgcttgagatgctaaattacgtggattataacatcatattccggcgtatgaattgatgagttgtacatcttgacattttcttctttcttctcttctccctttcccagaaacaaactttttttacccactataaaataaaatgagtatactacctattatatttctttctatatttttttattcttcattcgttcagacttttaacgcgtctgaatgtatcgacaaagggcaatattttgcatcattcatggagttagaaaacgagccagtaatcttaccatgtcctcaaataaatacgctatcatccggatataatatattagatattttatgggaaaaacgaggagcggataatgatagaattataccgatagataatggtagcaatatgctaattctgaacccgacacaatcagactctggtatttatatatgcattaccacgaacgaaacctactgtgacatgatgtcgttaaatttgacaatcgtgtctgtctcagaatcaaatatagatcttatctcgtatccacaaatagtaaatgagagatctactggcgaaatggtatgtcccaatattaatgcatttattgctagtaacgtaaacgcagatattatatggagcggacatcgacgccttagaaataagagacttaaacaacggacacctggaattattaccatagaagatgttagaaaaaatgatgctggttattatacatgtgttttagaatatatatacggtggcaaaacatataacgtaaccagaattgtaaaattagaggtacgggataaaataataccttctactatgcaattaccagatggcattgtaacttcaataggtagtaatttgactattgcgtgtagagtatcgttgaggcctcccacaacggacaccgacgtcttttggataagtaatggtatgtattacgaagaagatgatggggacggaaacggtagaataagtgtagcaaataaaatctatatgaccgataagagacgtgttattacatcccggttaaacattaatcctgttaaggaagaagatgctacaacgtttacgtgtatggcgtttactattcctagcatcagtaaaacagttactgttagtataacgtgaatgtatgttgttacatttccatgtcaattgagtttataagaatttttatacattatcttccaacaagcaattgacgaacgtattgctatgattaactcccacgatactatgcatattattaatcattaacttgcagactatacctagagctattttgacatactcgtgttcttgtgtaattgcagtatctatattattaaagtacgtaaatctagctatagttttattatttaattttagataatataccgtctccttatttttaaaaattgccacatcctttattaaatcatgaatgggaatttctatgtcatcgttagtatattgtgaacaacaagagcagatatctataggaaagggtggaatgcgatacattgatctatgtagttttaaaacacacgcgaactttgaagaatttatataaatcattccatcgatacatccttctatgttgacatgtatatatccaggaattcgtttattaatatcgggaaatgtataaactaaaacattgcccggaagcggtgcctctatctgcgttatatccgttcttaacttacaaaatgtaaccaatacctttgcatgacttgttttgttcggcaacgttagtttaaacttgacgaatggattaattacaatagcatgatccgcgcatctattaagtttttttactttaacgcccttgtatgtttttacagagactttatctaaatttctagtgcttgtatgtgttataaatataacgggatatagaactgaatcacctaccttagatacccaattacattttatcagatccagataataaacaaattttgtcgccctaactaattctatattgttatatattttacaattggttatgatatcatgtaataacttggagtctaacgcgcatcgtcgtacgtttatacaattgtgatttagtgtagtatatctacacatgtatttttccgcactatagtattctggactagtgataaaactatcgttatatctgtcttcgatgaactcatcgagatattgctctctgtcatattcatagacctgcataaactttctagacatcttacaatccgtgttattttaggatcatatttacatatttacgggtatatcaaagatgttagattagttaatgggaatcgtctataataatgaatattaaacaattatatgaggacttttaccacaaagcatcataaaaatgagtcgtcgtctgatttatgttttaaatatcaaccgcgaatcaactcataaaatacaagagaatgaaatatatacatattttagtcattgcaatatagaccatacttctacagaacttgattttgtagttaaaaactatgatctaaacagacgacaacctgtaactgggtatactgcactacactgctatttgtataataattactttacaaacgatgtactgaagatattattaaatcatggagtggatgtaacgatgaaaaccagtagcggacgtatgcctgtttatatattgcttactagatgttgtaatatttcacatgatgtagtgatagatatgatagacaaagataaaaaccacttatcgcatagagactattccaacctactactagagtatataaaatctcgttacatgttattgaaggaagaggatatcgatgagaacatagtatcaactttattagataagggaatcgatcctaactttaaacaagacggatatacagcgttacattattattatttgtgtctcgcacacgtttataaaccaggtgagtgtagaaaaccgataacgataaaaaaggccaagcgaattatttctttgtttatacaacatggagctaatctaaacgcgttagataattgtggtaatacaccattccatttgtatcttagtattgaaatgtgtaataatattcatatgactaaaatgctgttgacttttaatccgaatttcaaaatatgtaataatcatggattaacgcctatactatgttatataacttccgactacatacaacacgatattcttgttatgttaatacatcactatgaaacaaatgttggagaaatgccgatagatgagcgtcgtataatcgtattcgagtttatcaaaacatattctacacgtccggcagattcgataacttatttgatgaataggtttaaaaatataaatatttatacccgctatgaaggaaagacattattacacgtagcatgtgaatataataatacacaagtaatagattatcttatacgtatcaacggagatataaatgcgttaaccgacaataacaaacacgctatccaactcattatagataacaaagaaaattccccgtataccatcgattgtttattgtatatacttagatatattgtagataagaatgtgataagatcgttggtggatcaacttccatctctacctatcttcaatataaaatcatttgagaaattcatatcctactgtatacttttagatgacacattttacaataggcacgttaggaatcgcaattctaaaacgtatcgatacgcattttcaaaatacatgtcgtttgataaatacgatggtataataactaaatgtcataaagaaacaatattgctcaaactatccactgttctagacactacactatatgcagttttaagatgccataattcgaaaaagttaagaagatacctcaacgagttaaaaaaatataataacgataagtcctttaaaatatattctaatattatgaatgagagataccttaatgtatattataaagatatgtacgtgtcaaaggtatatgataaactatttcctgttttcacagataaaaattgtctactaacattactaccttcagaaattatatacgaaatattatacatgctgacaattaacgatctttataatatatcgtatccacctaccaaagtatagttgtatttttctcatgcgatgtgtgtaaaaaaactgatattatataaatattttagtgccgtataataaagatgacgatgaaaatgatggtacatatatatttcgtatcattatcattattgttattgctattccacagttacgccatagacatcgaaaatgaaatcacagaattcttcaataaaatgagagatactctaccagctaaagactctaaatggttgaatccagcatgtatgttcggaggcacaatgaatgatatggccactctaggagagccattcagcgcaaagtgtcctcctattgaagacagtcttttatcgcacagatataaagactatgtggttaaatgggaaaggctagaaaagaatagacggcgacaggtttctaataaacgtgttaaacatggtgatttatggatagccaactatacatctaaattcagtaaccgtaggtatttgtgtaccgtaactacaaagaatggtgactgtgttcagggtatagttagatctcatattagaaaacctccttcatgcattccaaaaacatatgaactaggtactcatgataagtatggcatagacttatactgtggaattctttacgcaaaacattataataatataacttggtataaagataataaggaaattaatatcgacgatattaagtattcacaaacgggaaagaaattaattattcataatccagagttagaagatagcggaagatacgactgttacgttcattacgacgacgttagaatcaagaatgatatcgtagtatcaagatgtaaaatacttacggttataccgtcacaagaccacaggtttaaactaaaaagaaattgcggatatgcgtcaaattaaaataaatggtacggacatgcttacagtgatgtacatgttaaataaacctacaaagaaacgatatgttaataatccgatatttacagattgggctaataagcaatataagttttataatcaaataatatataatgctaataagttaatagaacaaagtaagaaaatagacgacatgatagaggaggtatccattgacgataatcgtttatcaacactaccgttagaaattagacatttgattttctcgtacgcgttcctataaaaatagaaactataatcatataatagtgtaggttggtagtattgctcttgtgactagagactttagttaaggtactgtaaaaatagaaactataatcatataatagtgtaggttggtagtagggtactcgtgattaattttattgttaaacttgtccttaagtcttattaatatgtcttctaaagggggtagtggcggcatgtggagtgtctttatccatggacatgatggtagtaataaaggatctaaaacttatacatctggtggcggtggaatgtggggaggaggatcgtccagtggggttaacggaggtgtaaaatctggaactggtaaaatttaaacatagggataacagggtaat

SEQ ID NO: 33 - DNA, 17641 bp, Vaccinia virus
tagggataacagggtaatatgacgatgaaaatgatggtacatatatatttcgtatcattatcattattgttattgctattccacagttacgccatagacatcgaaaatgaaatcacagaattcttcaataaaatgagagatactctaccagctaaagactctaaatggttgaatccagcatgtatgttcggaggcacaatgaatgatatggccactctaggagagccattcagcgcaaagtgtcctcctattgaagacagtcttttatcgcacagatataaagactatgtggttaaatgggaaaggctagaaaagaatagacggcgacaggtttctaataaacgtgttaaacatggtgatttatggatagccaactatacatctaaattcagtaaccgtaggtatttgtgtaccgtaactacaaagaatggtgactgtgttcagggtatagttagatctcatattagaaaacctccttcatgcattccaaaaacatatgaactaggtactcatgataagtatggcatagacttatactgtggaattctttacgcaaaacattataataatataacttggtataaagataataaggaaattaatatcgacgatattaagtattcacaaacgggaaagaaattaattattcataatccagagttagaagatagcggaagatacgactgttacgttcattacgacgacgttagaatcaagaatgatatcgtagtatcaagatgtaaaatacttacggttataccgtcacaagaccacaggtttaaactaaaaagaaattgcggatatgcgtcaaattaaaataaatggtacggacatgcttacagtgatgtacatgttaaataaacctacaaagaaacgatatgttaataatccgatatttacagattgggctaataagcaatataagttttataatcaaataatatataatgctaataagttaatagaacaaagtaagaaaatagacgacatgatagaggaggtatccattgacgataatcgtttatcaacactaccgttagaaattagacatttgattttctcgtacgcgttcctataaaaatagaaactataatcatataatagtgtaggttggtagtattgctcttgtgactagagactttagttaaggtactgtaaaaatagaaactataatcatataatagtgtaggttggtagtagggtactcgtgattaattttattgttaaacttgtccttaagtcttattaatatgtcttctaaagggggtagtggcggcatgtggagtgtctttatccatggacatgatggtagtaataaaggatctaaaacttatacatctggtggcggtggaatgtggggaggaggatcgtccagtggggttaacggaggtgtaaaatctggaactggtaaaatttaaacactaaattatttttattaataattgtacaagtttttgacatgatatttaatgacattagttgtgtgggtgtatagagttcacagtagctcattcagtcaaaatgtttgactatttggaaaatgaggaggtggctctcgatgaacttaaacagatgttgagagacagagatcctaatgataccaggaaccaattcaagaataatgctttacacgcatacctttttaatgagcattgtaataatgtcgaggtcgtcaaactactactagacagtggcactaatccattacgcaaaaattggagacagctaccccattagaagaatacacaaatagtagacatgttaaagttaaaggatatagcgatggctctactagaagccactggatttagcaacataaatgactttaatatattcagctatatgaaatccaaaaatgtagacgttgacttgataaaggtgttggtagaacatggatttgacttgagtgttaaatgtgaaaaccatcgttcagttatagaaaattatgtaatgacaatgatcctgttcctaaaattattgatttgttcatagaaaatggctgcagtgttctttatgaggacgagtactgatacgcgtatgatgattatcaactacgaaattgcggtaccgtattgcatctgtattcaaagtcggatacgagagcatatgtgcgtccggaagttgttaaatgtctaattaatcacggaatcaagccgtcttttatagataaaaactattgtacaggtcttcaatattatattaagtcatctcatatagatatagacatcgttaaattgttaatgaaaggaatagataacactgcttattcatatatagacgatctaacatgttgcactcgaggaattatggctgattatctaaatagtgattatagatacaataaagatgtagatttggtcaaattgtttttggagaatggaaagcctcacggaataatgtgtagtattgtaccactatggagaaatgataaggaaaccatctttttgatattgaaaacaatgaactcggatgtcctccaacatatactaattgagtatatgacattcggcgatatccctctagtggaatatggaactgtggtaaataaagaggctatacacggatactttagaaatattaatattgattcttacacgatgaaatatctactaaaaaaggaagggagatgccatcaattatctcgatgatggagagatcccgattggacacctatgtaaatccaactatgaatgttataatttttacacttatacatacaaaaagggtctttgtgacatgtcttatgcttgcccaattcttagtactataaacatttgcctaccttatcttaaagacattaacatgattgacaaacgaggagaaacacttcttcacaaggctgttagatataataaacaatctctagtatctttactgctagaatccggttcagatgtcaacattagatcaaataacggatatacatgtatagccattgccatcaacgaatctaaaaacattgaactgctgaaaatgctattatgtcataaacctacattagattatgtgattgattcattgagagaaatatctaacatcgtagataactactatgctataaaacaatgtattaaatatgccatgattatagatgactgtacatcgtctaagattccagagtccataagtcaacgctataatgattatatagatctttgcaattaagaattgaatgagatgaaaaaaataatggtaggtggtaatactatgttctcattaatatttactgatcatggagctaaaattattcatagatatgccaataatccagaattacgtgagtattatgagttaaaacaaaataaaatatatgtggaagcatatgatattatttccaacgcaatagtgaaacatgatagaatacataaaaccatagaatcagttgatgataatacctacatttctaatcttccgtataccatcaaatacaaaatattcgagcaacaataagtattttttatacctttaaaattgataaataaattttttctagtgatattttggcaagatgagaatcctatttctcatcgccttcatgtatgggtgtgttcacccatatgttaatgccgacgaaatcaaatgtcctaacctaaacatcgtaacatcttctggagaatttcgttgcactggatgtgtgaaatttatgcctaattttagctacatgtattggttggcaaaggatatgagatcggacgaggataccaagtttatagaacatctgggtgatggcatcaaagaagatgaaaccgttcgtaccatagatggtagaatcgtcactctacagaaagtccttcatgtaaccgatactaataaatttgctcattataggttcacttgtgtcctcactacgatagatggcatttataaaaagaatgtttgctgaagtagttgtgtgctactatttttatttatgatataatctaaatgcaattgtcttgagaatccatccaatacggcagattatattagaaacaacgaattgaattgaatttaatctttcatacgagaaaaataacgacatacgtcgtcaacaaattaaactttttatttattagttaactagcttatagaacttgctcattgttatgtttctaaaacgggtacgacatataggacaattatccgacgcaccggtttctcttcgtgttttatgccatatattgatacatgttatgcaaaatatatgattacacgaatccaataaaccaaagtatctatcgttttgagtaaacaacttcatagcaaattccacattctttttctttacttactctatacacgtcctcgtatttatccagtattttgatgatatccaactcagaaatggttgttgtattattgggtgtataggtattattagctatgtaccaatttaccaaccttcttaatattgattgataatcacatcggttatccaattaataactaaattgtagtgtatatatagaccatatatgtttctatttttttgacagttacgtatagtttcagtaagttttgattgttgtattcctgtatctctagataagttagtcatatagtcccttccggcgatacgttttttccaagcccgaaattgattagccaaatgtggatttatttttgtgatattgatataatatttcggataatgcatactgttagtcttatatcatttggttcatctatgtattgtaatattgttacatgatctatagatgatgtattgattttggcaggatcgaattccatatccgcgactaaacagtgaaaaaaatgtaaatactttttaaattttaaattagtaaaacttttttttattttttatgattccaaaaatactgaatacaaagtcctaaattataaatatggagatcatactaccacaacttattattatgtatacaaggccggtgtaatagatagatatatataattctattacaccggcagacaattaccgatcggtatttgtcgttaccaacataccgtataatatgtaatatacaattccataacccattgacagttgttatacatcaaaattgcaattcttttgattacgatgttataagaatgtagttaattgatgtatgatgttaatgtgtcctctttcctcttataacatcgtaatcaaaaacttttttataatatatacctaataatgtgtcttaatagttctcgtgattcgtcaaacaatcattcttataaaatataataaatcaacgtaaaaacacataaaaataagcgtaactaataagacaatggatatttacgacgataaaggtctacagactattaaactgtttaataatgaatttgattgtataaggaatgacatcagagaattatttaaacatgtaactgattccgatagtatacaacttccgatggaagacaattctgatattatagaaaatatcagaaaaatactatatagacgattaaaaaatgtagaatgtgttgacatcgataacacaataacttttatgaaatacgatccaaatgatgataataagcgtacgtgttctaattgggtacccttaactaataactatatggaatattgtctagtaatatatttggaaacaccgatatgtggaggcaaaataaaattataccaccctacaggaaatataaagtcggataaggatattatgtttgcaaagactctagactttaaatcaaagaaagtgttaactggacgtaagacaattgccgttctagacatatccgtttcatataatagatcaataactactattcactacaacgacgacgttgatatagatatacatactgataaaaatggaaaagagttatgttattgttatataacaatagatgatcattacttggttgatgtggaaactataggagttatagtcaatagatctggaaaatgtctgttagtaaataaccatctaggtataggtatcgttaaagataaacgtataagcgatagttttggagatgtatgtatggatacaatatttgacttttctgaagcacgagagttattttcattaactaatgatgataacagaaatatagcatgggacactgataaactagacgatgatacagatatatggactcccgtcacagaagatgattacaaatttctttctagactagtattgtatgcaaaatctcaatcggatactgtattcgactattatgttcttactggtgatacggaaccacccactgtattcattttcaaggtaactagattttactttaatatgctgaaataaaaaatttttgtataatatctagaggtagaggtattgtttagataaatacaaataacatagatacatcgcatatttagcatttttataaatatacataagacatacactttatacatttttgtaaaaatactcataaaaaaaatttataaaaattatggcacaaccatatcttgtagaggtagtttagttcgtcgagtgaacctataaacagataatagacaacacataataataatgcctactaatacaagcataataccgggagatgggatatatgacgttgtagtgtttggtttttctgaacgttgatagtctactaatactacatgctgacatctaatgcctgtataaccatgagagcatctacaatacataccgtcgatatctctagcgtggatacagtcaccgtgtaaacaatatccatctccctctggaccgcataatctgatagctggaatatctgttgtagcgtttgtaatttctggcaatgtcgtttcgatagcgttaccactatcggcgaatgatctgattatcatagcagcgaacaacaacatcagatatttcatcgacatttttgatggattctgtgtttatgctgtttctcagtgtgtgtttatgacaagattgggaattttatattattaattcagtaatataaactaataatatattgttaattgtgtaaataatataaaaataacaatacaatattgaatgtgttgctgttaaaaatgtatgtgttaatataatagaataaaataaatgagtatgatcattttagataacgattgattttatcattacccttcattcttatattctttgcttacggaacctatatttagaaacatctactaacgattttttatgcttgcattattaatggtatgtaataccaatttgttaagtatgaatacggggtacaaacataaactgaaatttaacattatttatttatgatatatatcgttatcgttattgtttggtctataccatggatatctttaaagaactaatcgtaaaacaccctgatgaaaatgttttgatttctccagtttccattttatctactttatctattctaaatcatggagcagctggttctacagctgaacaactatcaaaatatatagagaatatgaatgagaatacacccgatgataagaaggatgacaataatgacatggacgtagatattccgtattgtgcgacactagctaccgcaaataaaatatacggtagcgatagtatcgagttccatgcctccttcctacaaaaaataaaagacgattttcaaactgtaaactttaataatgctaaccaaacaaaggaactaatcaacgaatgggttaagacaatgacaaatggtaaaattaattccttattgactagtccgctatccattaatactcgtatgacagttgttagcgccgtccattttaaagcaatgtggaaatatccattttctaaacatcttacatatacagacaagttttatatttctaagaatatagttaccagcgttgatatgatggtgggtaccgagaataacttgcaatatgtacatattaatgaattattcggaggattctctattatcgatattccatacgagggaaactctagtatggtgattatactaccggacgacatagaaggtatatataacatagaaaaaaatataacagatgaaaaatttaaaaaatggtgtggtatgttatctactaaaagtatagacttgtatatgccaaagtttaaagtggaaatgacagaaccgtataatctggtacctattctagaaaatttaggacttactaatatattcggatattatgcagattttagcaagatgtgtaatgaaactatcactgtagaaaaatttctacatacgacgtttatagatgttaatgaggagtatacagaagcatcggccgttacaggagtatttatgactaacttttcgatggtatatcgtacgaaggtctacataaaccatccattcatgtacatgattaaagacaacacaggacgtatactttttatagggaaatactgctatccgcaataaatataaacaaatagacttttatcacgtttatctatgtctaaatattacaaatagtataaactaaagctgataatacttaaaaaaataataatatcatttacaattaatagtataaactaaaaattaaacaaatcgttattataagtaatatcaaaatgatgatatacggattaatagcgtgtcttatattcgtgacttcatccatcgctagtccactttatattcccgttattccacccattacggaagataaatcgttcaatagtgtagaggtattagtttccttgtttagagatgaccaaaaagactatacggtaacttctcagttcaataactacactatcgataccaaagactggactatcggcgtactatccacacctgatggtttggatataccattgactaatataacttattggtcacggtttactataggtcgtgcattgttcaaatcagagtctgaggatattttccaaaagaaaatgagtattctaggtgtttctatagaatgtaagaagtcgtcgacattacttacttttttgaccgtgcgtaaaatgactcgagtatttaataaatttccagatatggcttattatcgaggagactgtttaaaagccgtttatgtaacaatgacttataaaaatactaaaactggagagactgattacacgtacctctctaatggggggttgcctgcatactatcgtaatggggtcgatggttgattattgattagtatattccttattcacacaaaaagaacatttttataaacatgaaaccactgtctaaatgtaattatgatcttgatttatagatgaagatcagcctttagaggattttaaccagtatgtttaatatgaaaaaaataaacataacatattttgagattaagcgctattgtgcttaattattttgctctataaactgaatatatagccacaattattgacgggcttgtttatgaccggcaatcatgaatttacagaaattatctctggctatatatcttactgcgacatgttcgtggtgttatgaaacatgcataagaaaaactgcgttgtatcatgacattcaattggagcatgtagaagacaataaagatagtgtagcgtcgctaccgtacaagtagtcaatcaaagagaacgtagtagattgttggctacatttaattggacagatatagctgagggtgttagaaatgagttcattaaaatatgtgatatcaacggaacatatttatataattatactattgctgttagtataattattgattccacggaagaactaccaacagttactccaattacaacaacatatgaaccttctacatataattatactatcgatgatagcactgttattactactgaagaactacaagtgactcctcatatggatctccatcgatgatacatgtattaaaatactttccgaataagtcttttaaatattgtattaattatgaaaaactatgctatgcgagtatgatgcaaagatgtttaatgatacgatactagattttatctctagcgagagatgtcgttagaatcatttatcataactacgtttaataataattcatcaacgaatatcgataacatgtgtcatttatacgttaaagtctgtccgtcttctctattgtttagactgtttgtagaatgctgtgatataaacaaactagtagaaggtacgactccgttacactgttatctaatgaatgaaggatttgaatcatctgttttaaaaaacctattaaaggagtatgtcatgacagtgatggtcacattccattacacaaatatttaactcatgatgaagttgagaatgatatgctttctgatagtatagatagctttagctaatataaaaatatattaatccactatatattctagacttgatttaaaaccgataaactactacgtactgtataagttgttaagaaaaggagcagaccctaattatgcagatgatagaggtaatacttttcttcattacttctgcatctatatgtccacttatgagaaaacgtcatttaataagatgcatcgtgaaaagaaatttattaaagagttggtaaaatatgaaaccgaaagtaaataatataggaaatacacctctacataactacgtatctcaatatgatatcactctcattcctcatccacaacccattaaaaaaatggaaattaaagccctctattagcataaacggctacaggtctacctttacaatggcctttccttgtgcccagttcagaccctgtcattgccacgctactaaggactccctgaataccgtggccgacgtcagacattgtctgactgaatacatcctgtgggtttctcatagatggacccatagagaaactgcagggcctctctacaggcttctcatctctttcagaactgatgcaacggagctctttggtggtgagttgaaggattcacttccgtgggacaatatcgacaattgcgtggagatcattaaatgtttcatcagaaatgactccatgaaaaccgccgaagaacttcgtgcaatcattggactttgtactcaatcagctatcgtctctggaagagtcttcaacgataagtatatcgacatactacttatgctgcgaaagattctgaacgagaacgactatctcaccctcttggatcatatccgcactgctaaatactaaatctccttcatgctctctcactacactttttatcatcttatgaggaatgattgccttcatcatttttcgtgaaataggaataattagcaccagaatagctatggattgcacatgtattctatgtcgtctactggatgaagatgtgacgtacaaaaaaataaaactagaaattgaaacgtgtcacaacttatcaaaacatatagatagacgaggaaacaatgcgctacattgttacgtcttcaataaatgcgatacagacattaagattgttcgactgttactctctcgcggagtcgagagactttgtagaaacaacgaaggattaactccgctaggagtatacagtaagcatagatacgtcaaatctcaaattgtgcatctactgatatccagctattcgaattcctctaacgaactcaagtcgaatataaatgatttcgatctgtattcggataatatcgacttacgtctgctaaaatacctaattgtggataaacggatacgtccgtccaagaatacgaattatgcaatcaatggtctcggattggtggatatatacgtaacgacgcctaatccgagaccagaagtattgctatggcttcttaaatcagaatgttacagcaccggttacgtatttcgtacctgtatgtacaacagtgatatgtgtaagaactctcttcattactatatatcgtctcatagagaatctcaatctctatccaaggatgtaattaaatgtttgatcaataacaatgtttccatccatggcagagacgaaggaggatctttacccatccaatactactggtctttctcaaccatagatatagagattgttaaattattattaataaaggatgtggacacgtgtagagtatacgacgtcagccctatattagaggcgtattatctaaacaagcgatttagagtaaccccatataatgtagacatggaaatcgttaatcttcttattgagagacgtcatactcttgtcgacgtaatgcgtagtattacttcgtacgattccagagaatataaccactacatcatcgataacattctaaagagatttagacaacaggatgaatccatcgtacaagccatgttgataaactacttacattacggcgatatggtcgttcgatgcatgttagataacggacaacaactatcctctgcacgactactttgttaataataatctcgtcgatgtaaacgtcgtaaggtttatcgtggaaaatatggacacgcggctgtaaatcacatatctaacaatggccgtctatgtatgtacggtctgatattatcgagatttaataattgcgggtatcactgttatgaaaccatactaatagatgtatttgatatactaagcaagtacatggataatatagatatgatcgataatgagaataaaactctactatattacgcggtcgatgtcaataatatacaatttgcaaagcggttattggaatatggagcgagtgttacaacatcacgctcgataatcaatacggccatccagaaaagtagttacagaagagaaaacaaaacgaagctagttgatttattacttagctaccatcccactctagagactatgattgacgcatttaatagagatatacgctatctatatcctgaaccattattcgcctgtatcagatacgccttaatcatagatgatgattttccttctaaagtaaagtatgatatcgccggtcgtcataaggaactaaagcgctatagagtagacattaatagaatgaagaatgcctacatatcaggcgtctccatgtttgatatattatttaaacgaagcaaacgccacagattgagatacgcaaagaatccgacatcaaatggtacaaaaaagaactaacgtccatcattacagaaactgtaaagaacaatgagaggatcgactccatagtggacaacattaatacagacgataacttgatttcgaaattacccatggagatactttattactccattaaataatttatcatggagcgataatgtcctgtttcatttgtttccatgacatattacaaaatcgattccgtccaagatgataaaaacatttaccggcatcataaacacggagtttattttatatgtctcgcataaacattactaaaaaaatatattgttcggttttctttcacatctttaattatgaaaaagtaaatcattatgagatggacgagattgtacgcatcgttcgcgacagtatgtggtacatacctaacgtatttatggacgacggtaagaatgaaggtcacgtttctgtcaacaatgtttgtcatatgtattttacgttctttgatgtggatacatcgtctcatctgtttaagctagttattaaacactgcgatctgaataaacgaggtaactctccattacattgctatacgatgaatacacgatttaatccatctgtattaaagatattgttacaccacggcatgcgtaactttgatagcaaggatgaccactatcaatcgataacaagatctttgatatactaacggacaccattgatgactttagtaaatcatccgatctattgctgtgttatcttagatataaattcaatgggagcttaaactattacgttctgtacaaaggatccgaccctaattgcgccgacgaggatgaactcacttctcttcattactactgtaaacacatatccacgttctacaaaagcaattattacaagtcaagtcacactaagatgcgagccgagaagcgattcatctacgcgataatagattatggagcaaacattaacgccgttacacacttaccttcaacagtataccaaacatagtcctcgtgtggtgtatgctcttttatctcgaggatacgtaataatcttgattgtacacccatcatggaacgattgtgcaacaggtcatattctcataatgttactcaattggcacgaacaaaaggaagaaggacaacatctactttatctattcataaaacataatcaaggatacactctcaatatactacggtatctactagataggttcgacattcagaaagacgaatattataataccgcctttcaaaattgtaacaacaatgttgcctcatacatcggatacgacatcaaccttccgactaaagacggtattcgacttggtgtttgaaaacagaaacatcatatacaaggcggatgttgtgaatgacatcatccaccacagactgaaagtacctatgattaaatcgttgttctacaagatgtcagaattctctccctacgacgattactacgtaaaaaagatactagcctactgcctattaagggacgagtcattcgcggaactacatagtaaattctgtttaaacgaggactataaaagtgtatttatgaaaaatatatcattcgataagatagattccatcatcgtgacataagtcgccttaaagagattcgaatctccgacaccgacctgtatacggtatcacagctatcttaaagccatacattcagacagtcacatttcatttcccatgtacgacgatctcatagaacagtgccatctatcgatggagcgtaaaagtaaactcgtcgacaaagcactcaataaattagagtctaccatcgatggccaatctagactatcgtatttgcctccggaaattatgcgcaatatcatctaaacagtatgttgtacggaaagaaccattacaaatattatccatgatagaaagaaaatatctatatgattggagaagtaggaaacaggaacaagacaacgattactacattattaaattatgaagtccgtattatactcgtatatattgtttctctcatgtataataataaacggaagagatatagcaccgcatgcaccatccgatggaaagtgtaaagacaacgaatacaaacgccataatttgtgtccgggaacatacgcttccagattatgcgatagcaagactaacacacaatgtacgccgtgtggttcgggtaccttcacatctcgcaataatcatttacccgcttgtctaagttgtaacggaagatgcgatcgtgtaacactactcacaatagaatctgtgaatgctctcccggatattattgtcttctcaaaggatcatccggatgcaaggcatgtgtttcccaaacaaaatgtggaataggatacggagtatccggagacgtcatctgttctccgtgtggtctcggaacatattctcacaccgtctcttccgcagataaatgcgaacccgtacccagaaatacgtttaactatatcgatgtggaaattaacctgtatccagttaacgacacatcgtgtactcggacgaccactaccggtctcagcgaatccatctcaacgtcggaactaactattactatgaatcataaagactgcgatcccgtctttcgtgatggatacttctctgtccttaataaggtagcaacttcaggtttctttacaggagaaaggtgtgcactctgaatttcgagattaaatgcaataacaaagattcttcctccaaacagttaacgaaagcaaagaatgatactatcatgccgcattcggagactgtctatctagcgtcgacatctatatactatatagtaataccaatactcaagactacgaaactgatacaatctcttatcatgtgggtaatgttctcgatgtcgatagccatatgcccggtagttgcgatatacataaactgatcactaattccaaacccacccgctttttatagtaagtttttcacccataaatacaataattaatttctcgtaaaagtagaaaatatattctaatttattgcacggtaaggaagtagaatcataaagaacagtaatcaatcaatagcaatcatgaaacaatatatcgtcctggcatgcatgtgcctgccagtcttcagcaatcctcctcctcgtgtacggaagaagaaaacaaacatcatatgggaatcgatgttattatcaaagtcacaaagcaagaccaaacaccgaccaatgataagatttgccaatccgtaacggaaattacagagtccgagtcagatccagatcccgaggtggaatcagaagatgattccacatcagtcgaggatgtagatcctcctaccacttattactccatcatcggtggaggtctgagaatgaactttggattcaccaaatgtcctcagattaaatccatctcagaatccgctgatggaaacacagtgaatgctagattgtccagcgtgtccccaggacaaggtaaggactctcccgcgatcactcatgaagaagctcttgctatgatcaaagactgtgaggtgtctatcgacatcagatgtagcgaagaagagaaagacagcgacatcaagacccatccagtactcgggtctaacatctctcataagaaagtgagttacgaagatatcatcggttcaacgatcgtcgatacaaaatgcgtcaagaatctagagtttagcgttcgtatcggagacatgtgcaaggaatcatctgaacttgaggtcaaggatggattcaagtatgtcgacggatcggcatctgaaggtgcaaccgatgatacttcactcatcgattcaacaaaactcaaagcgtgtgtctgaatcgataactctattcatctgaaattggatgagtagggttaatcgaacgattcaggcacaccacgaattaaaaaagtgtaccggacactatattccggtttgcaaaacaaaaatgttcttaactacattcacaaaaagttacctctcgcgacttcttctttttctgtctcaatagtgtgatacgattatgacactattcctattcctattcctatttcctttcagggtatcacaaaaatattaaacctctttctgatggtctcataaaaaaagttttacaaaaatatttttattctctttctctctttgatggtctcataaaaaaagttttacaaaaatatttttattctctttctctctttgatggtctcataaaaaaagttttacaaaaatatttttattctctttctctctttgatggtctcataaaaaaagttttacaaaaatatttttattctctttctctctttgatggtctcataaaaaaagttttacaaaaatatttttattctctttctctctttgatggtctcataaaaaaagttttacaaaaatatttttattctctttctctctttgatggtctcataaaaaaagttttacaaaaatatttttattctctttctctctttgatggtctcataaaaaaagttttacaaaaatatttttattctctttctctctttgatggtctcataaaaaatattaaacctctttctgatggtgtcactaaaatatttttattctcattctcattttctctttctctcttcaatggagtcataaaatatttttattctctttctctcttcgatggtctcacaaaaatattaaacctctttctgatggtgtcactaaaatatttttattctcattctcattttctctttctctcttcaatggagtcataaaatatttttattctctttctctcttcgatggtctcacaaaaatattaaacctcttgctagcttctggcgaagagcttcttctagggataacagggtaat

SEQ ID NO: 34 - DNA, 894 bp, Artificial Sequence
  Description of Artificial Sequence: Synthetic polynucleotide
caccgcaatagatcctrttagatacatagatcctcgtcgygatatcgcattttctaacgtgatggatatattaaagtygaataaagtgaacaataattaattctttattgtcatcatgaacggcggacatattcagttgataatcggccccatgttttcaggtaaaagtacagaattaattagacgagttagacgttatcaaatagctcaatataaatgcgtgactataaaatattctaacgataatagatacggaacgggactatggacgcatgataagaataattttgaagcattggaagcaactaaactatgygatgtyttggaatyaattacagatttctccgtgataggtatcgatgaaggacagttctttccagacattgttgaattctgtgagcgtatggcaaacgaagraaaaatagttatagtagccgcactcgatgggacatttcaacgtaaaccgtttaataatattttgaatcttattccattatctgaaatggtggtaaaactaactgctgtgtgtatgaaatgctttaaggaggcttccttttctaaacgattgggtgaggaaaccgagatagagataataggaggtaatgatatgtatcaatcggtgtgtagaaagtgttacrtcgrctcataatattatattttttatctaaaaaactaaaaataaacattgattaaattttaatataatacttaaaaatggatgttgtgtcgttagataaaccgtttatgtattttgaggaaattgataatgagttagattacgaaccagaaagtgcaaatgaggtcgcaaaaaaactrccgtatcaaggacagttaaaactattactaggagaattattttttcttagtaagttacagcgacacggtatattagat

SEQ ID NO: 35 - DNA, 894 bp, Artificial Sequence
  Description of Artificial Sequence: Synthetic polynucleotide
caccgcaatagatcctattagatacatagatcctcgtcgtgatatcgcattttctaacgtgatggatatattaaagttgaataaagtgaacaataattaattctttattgtcatcatgaacggcggacatattcagttgataatcggccccatgttttcaggtaaaagtacagaattaattagacgagttagacgttatcaaatagctcaatataaatgcgtgactataaaatattctaacgataatagatacggaacgggactatggacgcatgataagaataattttgaagcattggaagcaactaaactatgcgatgttttggaattaattacagatttctccgtgataggtatcgatgaaggacagttctttccagacattgttgaattctgtgagcgtatggcaaacgaagaaaaaatagttatagtagccgcactcgatgggacatttcaacgtaaaccgtttaataatattttgaatcttattccattatctgaaatggtggtaaaactaactgctgtgtgtatgaaatgctttaaggaggcttccttttctaaacgattgggtgaggaaaccgagatagagataataggaggtaatgatatgtatcaatcggtgtgtagaaagtgttacgtcggctcataatattatattttttatctaaaaaactaaaaataaacattgattaaattttaatataatacttaaaaatggatgttgtgtcgttagataaaccgtttatgtattttgaggaaattgataatgagttagattacgaaccagaaagtgcaaatgaggtcgcaaaaaaactaccgtatcaaggacagttaaaactattactaggagaattattttttcttagtaagttacagcgacacggtatattagat

SEQ ID NO: 36 - DNA, 894 bp, Artificial Sequence
  Description of Artificial Sequence: Synthetic polynucleotide
caccgcaatagatcctgttagatacatagatcctcgtcgcgatatcgcattttctaacgtgatggatatattaaagtcgaataaagtgaacaataattaattctttattgtcatcatgaacggcggacatattcagttgataatcggccccatgttttcaggtaaaagtacagaattaattagacgagttagacgttatcaaatagctcaatataaatgcgtgactataaaatattctaacgataatagatacggaacgggactatggacgcatgataagaataattttgaagcattggaagcaactaaactatgtgatgtcttggaatcaattacagatttctccgtgataggtatcgatgaaggacagttctttccagacattgttgaattctgtgagcgtatggcaaacgaaggaaaaatagttatagtagccgcactcgatgggacatttcaacgtaaaccgtttaataatattttgaatcttattccattatctgaaatggtggtaaaactaactgctgtgtgtatgaaatgctttaaggaggcttccttttctaaacgattgggtgaggaaaccgagatagagataataggaggtaatgatatgtatcaatcggtgtgtagaaagtgttacatcgactcataatattatattttttatctaaaaaactaaaaataaacattgattaaattttaatataatacttaaaaatggatgttgtgtcgttagataaaccgtttatgtattttgaggaaattgataatgagttagattacgaaccagaaagtgcaaatgaggtcgcaaaaaaactgccgtatcaaggacagttaaaactattactaggagaattattttttcttagtaagttacagcgacacggtatattagat

SEQ ID NO: 37 - DNA, 88 bp, Artificial Sequence
  Description of Artificial Sequence: Synthetic oligonucleotide
ttttattttttttttttggaatataaatatccggtaaaattgaaaaaatatacactaattagcgtctcgtttcagacgctagctcgag

SEQ ID NO: 38 - DNA, 149 bp, Artificial Sequence
  Description of Artificial Sequence: Synthetic polynucleotide
ttttattttttttttttggaatataaatatccggtaaaattgaaaaaatatacactaattagcgtctcgtttcagacgctagctcgaggaattcggtaccccgggttcgaaatcgataagcttggatccggagagctcccaacctcgag

SEQ ID NO: 39 - DNA, 210 bp, Artificial Sequence
  Description of Artificial Sequence: Synthetic polynucleotide
ttttattttttttttttggaatataaatatccggtaaaattgaaaaaatatacactaattagcgtctcgtttcagacgctagctcgaggttgggagctctccggatccaagcttatcgatttcgaacccggggtaccgaattcctcgaggttgggagctctccggatccaagcttatcgatttcgaacccggggtaccgaattcctcgag

SEQ ID NO: 40 - DNA, 38 bp, Artificial Sequence
  Description of Artificial Sequence: Synthetic oligonucleotide
tacactaattagcgtctcgtttcagacgctagctcgag

SEQ ID NO: 41 - DNA, 99 bp, Artificial Sequence
  Description of Artificial Sequence: Synthetic oligonucleotide
tacactaattagcgtctcgtttcagacgctagctcgaggaattcggtaccccgggttcgaaatcgataagcttggatccggagagctcccaacctcgag

SEQ ID NO: 42 - DNA, 160 bp, Artificial Sequence
  Description of Artificial Sequence: Synthetic polynucleotide
tacactaattagcgtctcgtttcagacgctagctcgaggttgggagctctccggatccaagcttatcgatttcgaacccggggtaccgaattcctcgaggttgggagctctccggatccaagcttatcgatttcgaacccggggtaccgaattcctcgag

SEQ ID NO: 43 - DNA, 5978 bp, Artificial Sequence
  Description of Artificial Sequence: Synthetic polynucleotide
atttacggattcaccaataaaaataaactagagaaacttagtactaataaggaactagaatcgtatagttctagccctcttcaagaacccattaggttaaatgattttctgggactattggaatgtattaaaaagaatattcctctaacagatattccgacaaaggattgattactataaatggagaatgttcctaatgtatactttaatcctgtgtttatagagcccacgtttaaacattctttattaagtgtttataaacacagattaatagttttatttgaagtattcattgtattcattctaatatatgtattttttagatctgaattaaatatgttcttcatgcctaaacgaaaaatacccgatcctattgatagattacgacgtgctaatctagcgtgtgaagacgataagttaatgatctatggattaccatggatgacaactcaaacatctgcgttatcaataaatagtaaaccgatagtgtataaagattgtgcaaagcttttgcgatcaataaatggatcacaaccagtatctcttaacgatgttcttcgcagatgatgattcattttttaagtatttggctagtcaagatgatgaatcttcattatctgatatattgcaaatcactcaatatctagactttctgttattattattgatccaatcaaaaaataaattagaagccgtgggtcattgttatgaatctctttcagaggaatacagacaattgacaaaattcacagactttcaagattttaaaaaactgtttaacaaggtccctattgttacagatggaagggtcaaacttaataaaggatatttgttcgactttgtgattagtttgatgcgattcaaaaaagaatcctctctagctaccaccgcaatagatcctattagatacatagatcctcgtcgtgatatcgcattttctaacgtgatggatatattaaagttgaataaagtgaacaataattaattctttattgtcatcttttattttttttttttggaatataaatatccggtaaaattgaaaaaatatacactaattagcgtctcgtttcagacgctagctcgaggttgggagctctccggatccaagcttatcgatttcgaacccggggtaccgaattcctcgaggttgggagctctccggatccaagcttatcgatttcgaacccggggtaccgaattcctcgagatgtttattttcttattatttcttactctcactagtggtagtgaccttgaccggtgcaccacttttgatgatgttcaagctcctaattacactcaacatacttcatctatgaggggggtttactatcctgatgaaatttttagatcagacactctttatttaactcaggatttatttcttccattttattctaatgttacagggtttcatactattaatcatacgtttggcaaccctgtcataccttttaaggatggtatttattttgctgccacagagaaatcaaatgttgtccgtggttgggtttttggttctaccatgaacaacaagtcacagtcggtgattattattaacaattctactaatgttgttatacgagcatgtaactttgaattgtgtgacaaccctttctttgctgtttctaaacccatgggtacacagacacatactatgatattcgataatgcatttaattgcactttcgagtacatatctgatgccttttcgcttgatgtttcagaaaagtcaggtaattttaaacacttacgagagtttgtgtttaaaaataaagatgggtttctctatgtttataagggctatcaacctatagatgtagttcgtgatctaccttctggttttaacactttgaaacctatttttaagttgcctcttggtattaacattacaaattttagagccattcttacagccttttcacctgctcaagacatttggggcacgtcagctgcagcctattttgttggctatttaaagccaactacatttatgctcaagtatgatgaaaatggtacaatcacagatgctgttgattgttctcaaaatccacttgctgaactcaaatgctctgttaagagctttgagattgacaaaggaatttaccagacctctaatttcagggttgttccctcaggagatgttgtgagattccctaatattacaaacttgtgtccttttggagaggtttttaatgctactaaattcccttctgtctatgcatgggagagaaaaaaaatttctaattgtgttgctgattactctgtgctctacaactcaacattcttttcaacctttaagtgctatggcgtttctgccactaagttgaatgatctttgcttctccaatgtctatgcagattcttttgtagtcaagggagatgatgtaagacaaatagcgccaggacaaactggtgttattgctgattataattataaattgccagatgatttcatgggttgtgtccttgcttggaatactaggaacattgatgctacttcaactggtaatcataattataaatataggtatcttagacatggcaagcttaggccctttgagagagacatatctaatgtgcctttctcccctgatggcaaaccttgcaccccacctgctcttaattgttattggccattaaatgattatggtttttacaccactactggcattggctaccaaccttacagagttgtagtactttcttttgaacttttaaatgcaccggccacggtttgtggaccaaaattatccactgaccttattaagaaccagtgtgtcaattttaattttaatggactcactggtactggtgtgttaactccttcttcaaagagatttcaaccatttcaacaatttggccgtgatgtttctgatttcactgattccgttcgagatcctaaaacatctgaaatattagacatttcaccttgctcttttgggggtgtaagtgtaattacacctggaacaaatgcttcatctgaagttgctgttctatatcaagatgttaactgcactgatgtttctacagcaattcatgcagatcaactcacaccagcttggcgcatatattctactggaaacaatgtattccagactcaagcaggctgtcttataggagctgagcatgtcgacacttcttatgagtgcgacattcctattggagctggcatttgtgctagttaccatacagtttctttattacgtagtactagccaaaaatctattgtggcttatactatgtctttaggtgctgatagttcaattgcttactctaataacaccattgctatacctactaacttttcaattagcattactacagaagtaatgcctgtttctatggctaaaacctccgtagattgtaatatgtacatctgcggagattctactgaatgtgctaatttgcttctccaatatggtagcttttgcacacaactaaatcgtgcactctcaggtattgctgctgaacaggatcgcaacacacgtgaagtgttcgctcaagtcaaacaaatgtacaaaaccccaactttgaaatattttggtggttttaatttttcacaaatattacctgaccctctaaagccaactaagaggtcttttattgaggacttgctctttaataaggtgacactcgctgatgctggcttcatgaagcaatatggcgaatgcctaggtgatattaatgctagagatctcatttgtgcgcagaagttcaatggacttacagtgttgccacctctgctcactgatgatatgattgctgcctacactgctgctctagttagtggtactgccactgctggatggacatttggtgctggcgctgctcttcaaataccttttgctatgcaaatggcatataggttcaatggcattggagttacccaaaatgttctctatgagaaccaaaaacaaatcgccaaccaatttaacaaggcgattagtcaaattcaagaatcacttacaacaacatcaactgcattgggcaagctgcaagacgttgttaaccagaatgctcaagcattaaacacacttgttaaacaacttagctctaattttggtgcaatttcaagtgtgctaaatgatatcctttcgcgacttgataaagtcgaggcggaggtacaaattgacaggttaattacaggcagacttcaaagccttcaaacctatgtaacacaacaactaatcagggctgctgaaatcagggcttctgctaatcttgctgctactaaaatgtctgagtgtgttcttggacaatcaaaaagagttgacttttgtggaaagggctaccaccttatgtccttcccacaagcagccccgcatggtgttgtcttcctacatgtcacgtatgtgccatcccaggagaggaacttcaccacagcgccagcaatttgtcatgaaggcaaagcatacttccctcgtgaaggtgttttcgtgtttaatggcacttcttggtttattacacagaggaacttcttttctccacaaataattactacagacaatacatttgtctcaggaaattgtgatgtcgttattggcatcattaacaacacagtttatgatcctctgcaacctgagctcgactcattcaaagaagagctggacaagtacttcaaaaatcatacatcaccagatgttgatcttggcgacatttcaggcattaacgcttctgtcgtcaacattcaaaaagaaattgaccgcctcaatgaggtcgctaaaaatttaaatgaatcactcattgaccttcaagaattgggaaaatatgagcaatatattaaatggccttggtatgtttggctcggcttcattgctggactaattgccatcgtcatggttacaatcttgctttgttgcatgactagttgttgcagttgcctcaagggtgcatgctcttgtggttcttgctgcaagtttgatgaggatgactctgagccagttctcaagggtgtcaaattacattacacataatattatattttttatctaaaaaactaaaaataaacattgattaaattttaatataatacttaaaaatggatgttgtgtcgttagataaaccgtttatgtattttgaggaaattgataatgagttagattacgaaccagaaagtgcaaatgaggtcgcaaaaaaactaccgtatcaaggacagttaaaactattactaggagaattattttttcttagtaagttacagcgacacggtatattagatggtgccaccgtagtgtatataggatcggctcctggtacacatatacgttatttgagagatcatttctataatttaggaatgattatcaaatggatgctaattgacggacgccatcatgatcctattctaaatggattgcgtgatgtgactctagtgactcggttcgttgatgaggaatatctacgatccatcaaaaaacaactgcatccttctaagattattttaatttctgatgtaagatccaaacgaggaggaaatgaacctagtacggcggatttactaagtaattacgctctacaaaatgtcatgattagtattttaaaccccgtggcatctagtcttaaatggagatgcccgtttccagatcaatggatcaaggacttttatatcccacacggtaataaaatgttacaaccttttgctccttcatattcagctgaaatgagattattaagtatttataccggtgagaacatgagactgactcgagttaccaaattagacgctgtaaattatgaaaaaaagatgtactaccttaataagatcgtccgtaacaaagtagttgttaactttgattatcctaatcaggaatatgactattttcacatgtactttatgctgaggaccgtatactgcaataaaacatttcctactactaaagcaaaggtactatttctacaacaatctatatttcgtttcttaaatattccaacaacatcaactgaaaaagttagtcatgaaccaatacaacgtaa

SEQ ID NO: 44 - DNA, 5978 bp, Artificial Sequence
  Description of Artificial Sequence: Synthetic polynucleotide
atttacggattcaccaataaaaataaactagagaaacttagtactaataaggaactagaatcgtatagttctagccctcttcaagaacccattaggttaaatgattttctgggactattggaatgtgttaaaaagaatattcctctaacagatattccgacaaaggattgattactataaatggagaatgttcctaatgtatactttaatcctgtgtttatagagcccacgtttaaacattctttattaagtgtttataaacacagattaatagttttatttgaagtattcgttgtattcattctaatatatgtattttttagatctgaattaaatatgttcttcatgcctaaacgaaaaatacccgatcctattgatagattacgacgtgctaatctagcgtgtgaagacgataaattaatgatctatggattaccatggatgacaactcaaacatctgcgttatcaataaatagtaaaccgatagtgtataaagattgtgcaaagcttttgcgatcaataaatggatcacaaccagtatctcttaacgatgttcttcgcagatgatgattcattttttaagtatttggctagtcaagatgatgaatcttcattatctgatatattgcaaatcactcaatatctagactttctgttattattattgatccaatcaaaaaataaattagaagccgtgggtcattgttatgaatctctttcagaggaatacagacaattgacaaaattcacagactctcaagattttaaaaaactgtttaacaaggtccctattgttacagatggaagggtcaaacttaataaaggatatttgttcgactttgtgattagtttgatgcgattcaaaaaagaatcagctctagctaccaccgcaatagatcctgttagatacatagatcctcgtcgcgatatcgcattttctaacgtgatggatatattaaagtcgaataaagtgaacaataattaattctttattgtcatcttttattttttttttttggaatataaatatccggtaaaattgaaaaaatatacactaattagcgtctcgtttcagacgctagctcgaggttgggagctctccggatccaagcttatcgatttcgaacccggggtaccgaattcctcgaggttgggagctctccggatccaagcttatcgatttcgaacccggggtaccgaattcctcgagatgtttattttcttattatttcttactctcactagtggtagtgaccttgaccggtgcaccacttttgatgatgttcaagctcctaattacactcaacatacttcatctatgaggggggtttactatcctgatgaaatttttagatcagacactctttatttaactcaggatttatttcttccattttattctaatgttacagggtttcatactattaatcatacgtttggcaaccctgtcataccttttaaggatggtatttattttgctgccacagagaaatcaaatgttgtccgtggttgggtttttggttctaccatgaacaacaagtcacagtcggtgattattattaacaattctactaatgttgttatacgagcatgtaactttgaattgtgtgacaaccctttctttgctgtttctaaacccatgggtacacagacacatactatgatattcgataatgcatttaattgcactttcgagtacatatctgatgccttttcgcttgatgtttcagaaaagtcaggtaattttaaacacttacgagagtttgtgtttaaaaataaagatgggtttctctatgtttataagggctatcaacctatagatgtagttcgtgatctaccttctggttttaacactttgaaacctatttttaagttgcctcttggtattaacattacaaattttagagccattcttacagccttttcacctgctcaagacatttggggcacgtcagctgcagcctattttgttggctatttaaagccaactacatttatgctcaagtatgatgaaaatggtacaatcacagatgctgttgattgttctcaaaatccacttgctgaactcaaatgctctgttaagagctttgagattgacaaaggaatttaccagacctctaatttcagggttgttccctcaggagatgttgtgagattccctaatattacaaacttgtgtccttttggagaggtttttaatgctactaaattcccttctgtctatgcatgggagagaaaaaaaatttctaattgtgttgctgattactctgtgctctacaactcaacattcttttcaacctttaagtgctatggcgtttctgccactaagttgaatgatctttgcttctccaatgtctatgcagattcttttgtagtcaagggagatgatgtaagacaaatagcgccaggacaaactggtgttattgctgattataattataaattgccagatgatttcatgggttgtgtccttgcttggaatactaggaacattgatgctacttcaactggtaatcataattataaatataggtatcttagacatggcaagcttaggccctttgagagagacatatctaatgtgcctttctcccctgatggcaaaccttgcaccccacctgctcttaattgttattggccattaaatgattatggtttttacaccactactggcattggctaccaaccttacagagttgtagtactttcttttgaacttttaaatgcaccggccacggtttgtggaccaaaattatccactgaccttattaagaaccagtgtgtcaattttaattttaatggactcactggtactggtgtgttaactccttcttcaaagagatttcaaccatttcaacaatttggccgtgatgtttctgatttcactgattccgttcgagatcctaaaacatctgaaatattagacatttcaccttgctcttttgggggtgtaagtgtaattacacctggaacaaatgcttcatctgaagttgctgttctatatcaagatgttaactgcactgatgtttctacagcaattcatgcagatcaactcacaccagcttggcgcatatattctactggaaacaatgtattccagactcaagcaggctgtcttataggagctgagcatgtcgacacttcttatgagtgcgacattcctattggagctggcatttgtgctagttaccatacagtttctttattacgtagtactagccaaaaatctattgtggcttatactatgtctttaggtgctgatagttcaattgcttactctaataacaccattgctatacctactaacttttcaattagcattactacagaagtaatgcctgtttctatggctaaaacctccgtagattgtaatatgtacatctgcggagattctactgaatgtgctaatttgcttctccaatatggtagcttttgcacacaactaaatcgtgcactctcaggtattgctgctgaacaggatcgcaacacacgtgaagtgttcgctcaagtcaaacaaatgtacaaaaccccaactttgaaatattttggtggttttaatttttcacaaatattacctgaccctctaaagccaactaagaggtcttttattgaggacttgctctttaataaggtgacactcgctgatgctggcttcatgaagcaatatggcgaatgcctaggtgatattaatgctagagatctcatttgtgcgcagaagttcaatggacttacagtgttgccacctctgctcactgatgatatgattgctgcctacactgctgctctagttagtggtactgccactgctggatggacatttggtgctggcgctgctcttcaaataccttttgctatgcaaatggcatataggttcaatggcattggagttacccaaaatgttctctatgagaaccaaaaacaaatcgccaaccaatttaacaaggcgattagtcaaattcaagaatcacttacaacaacatcaactgcattgggcaagctgcaagacgttgttaaccagaatgctcaagcattaaacacacttgttaaacaacttagctctaattttggtgcaatttcaagtgtgctaaatgatatcctttcgcgacttgataaagtcgaggcggaggtacaaattgacaggttaattacaggcagacttcaaagccttcaaacctatgtaacacaacaactaatcagggctgctgaaatcagggcttctgctaatcttgctgctactaaaatgtctgagtgtgttcttggacaatcaaaaagagttgacttttgtggaaagggctaccaccttatgtccttcccacaagcagccccgcatggtgttgtcttcctacatgtcacgtatgtgccatcccaggagaggaacttcaccacagcgccagcaatttgtcatgaaggcaaagcatacttccctcgtgaaggtgttttcgtgtttaatggcacttcttggtttattacacagaggaacttcttttctccacaaataattactacagacaatacatttgtctcaggaaattgtgatgtcgttattggcatcattaacaacacagtttatgatcctctgcaacctgagctcgactcattcaaagaagagctggacaagtacttcaaaaatcatacatcaccagatgttgatcttggcgacatttcaggcattaacgcttctgtcgtcaacattcaaaaagaaattgaccgcctcaatgaggtcgctaaaaatttaaatgaatcactcattgaccttcaagaattgggaaaatatgagcaatatattaaatggccttggtatgtttggctcggcttcattgctggactaattgccatcgtcatggttacaatcttgctttgttgcatgactagttgttgcagttgcctcaagggtgcatgctcttgtggttcttgctgcaagtttgatgaggatgactctgagccagttctcaagggtgtcaaattacattacacataatattatattttttatctaaaaaactaaaaataaacattgattaaattttaatataatacttaaaaatggatgttgtgtcgttagataaaccgtttatgtattttgaggaaattgataatgagttagattacgaaccagaaagtgcaaatgaggtcgcaaaaaaactgccgtatcaaggacagttaaaactattactaggagaattattttttcttagtaagttacagcgacacggtatattagatggtgccaccgtagtgtatataggatctgctcccggtacacatatacgttatttgagagatcatttctataatttaggagtgatcatcaaatggatgctaattgacggccgccatcatgatcctattttaaatggattgcgtgatgtgactctagtgactcggttcgttgatgaggaatatctacgatccatcaaaaaacaactgcatccttctaagattattttaatttctgatgtgagatccaaacgaggaggaaatgaacctagtacggcggatttactaagtaattacgctctacaaaatgtcatgattagtattttaaaccccgtggcatctagtcttaaatggagatgcccgtttccagatcaatggatcaaggacttttatatcccacacggtaataaaatgttacaaccttttgctccttcatattcagctgaaatgagattattaagtatttataccggtgagaacatgagactgactcgagttaccaaattagacgctgtaaattatgaaaaaaagatgtactaccttaataagatcgtccgtaacaaagtagttgttaactttgattatcctaatcaggaatatgactattttcacatgtactttatgctgaggaccgtgtactgcaataaaacatttcctactactaaagcaaaggtactatttctacaacaatctatatttcgtttcttaaatattccaacaacatcaactgaaaaagttagtcatgaaccaatacaacgtaa

SEQ ID NO: 45 - DNA, 3822 bp, Severe acute respiratory syndrome coronavirus 2; identical to SEQ ID NO: 9

SEQ ID NO: 46 - DNA, 29881 bp, Severe acute respiratory syndrome coronavirus 2
ttaaaggtttataccttcccaggtaacaaaccaaccaactttcgatctcttgtagatctgttctctaaacgaactttaaaatctgtgtggctgtcactcggctgcatgcttagtgcactcacgcagtataattaataactaattactgtcgttgacaggacacgagtaactcgtctatcttctgcaggctgcttacggtttcgtccgtgttgcagccgatcatcagcacatctaggtttcgtccgggtgtgaccgaaaggtaagatggagagccttgtccctggtttcaacgagaaaacacacgtccaactcagtttgcctgttttacaggttcgcgacgtgctcgtacgtggctttggagactccgtggaggaggtcttatcagaggcacgtcaacatcttaaagatggcacttgtggcttagtagaagttgaaaaaggcgttttgcctcaacttgaacagccctatgtgttcatcaaacgttcggatgctcgaactgcacctcatggtcatgttatggttgagctggtagcagaactcgaaggcattcagtacggtcgtagtggtgagacacttggtgtccttgtccctcatgtgggcgaaataccagtggcttaccgcaaggttcttcttcgtaagaacggtaataaaggagctggtggccatagttacggcgccgatctaaagtcatttgacttaggcgacgagcttggcactgatccttatgaagattttcaagaaaactggaacactaaacatagcagtggtgttacccgtgaactcatgcgtgagcttaacggaggggcatacactcgctatgtcgataacaacttctgtggccctgatggctaccctcttgagtgcattaaagaccttctagcacgtgctggtaaagcttcatgcactttgtccgaacaactggactttattgacactaagaggggtgtatactgctgccgtgaacatgagcatgaaattgcttggtacacggaacgttctgaaaagagctatgaattgcagacaccttttgaaattaaattggcaaagaaatttgacaccttcaatggggaatgtccaaattttgtatttcccttaaattccataatcaagactattcaaccaagggttgaaaagaaaaagcttgatggctttatgggtagaattcgatctgtctatccagttgcgtcaccaaatgaatgcaaccaaatgtgcctttcaactctcatgaagtgtgatcattgtggtgaaacttcatggcagacgggcgattttgttaaagccacttgcgaattttgtggcactgagaatttgactaaagaaggtgccactacttgtggttacttaccccaaaatgctgttgttaaaatttattgtccagcatgtcacaattcagaagtaggacctgagcatagtcttgccgaataccataatgaatctggcttgaaaaccattcttcgtaagggtggtcgcactattgcctttggaggctgtgtgttctcttatgttggttgccataacaagtgtgcctattgggttccacgtgctagcgctaacataggttgtaaccatacaggtgttgttggagaaggttccgaaggtcttaatgacaaccttcttgaaatactccaaaaagagaaagtcaacatcaatattgttggtgactttaaacttaatgaagagatcgccattattttggcatctttttctgcttccacaagtgcttttgtggaaactgtgaaaggtttggattataaagcattcaaacaaattgttgaatcctgtggtaattttaaagttacaaaaggaaaagctaaaaaaggtgcctggaatattggtgaacagaaatcaatactgagtcctctttatgcatttgcatcagaggctgctcgtgttgtacgatcaattttctcccgcactcttgaaactgctcaaaattctgtgcgtgttttacagaaggccgctataacaatactagatggaatttcacagtattcactgagactcattgatgctatgatgttcacatctgatttggctactaacaatctagttgtaatggcctacattacaggtggtgttgttcagttgacttcgcagtggctaactaacatctttggcactgtttatgaaaaactcaaacccgtccttgattggcttgaagagaagtttaaggaaggtgtagagtttcttagagacggttgggaaattgttaaatttatctcaacctgtgcttgtgaaattgtcggtggacaaattgtcacctgtgcaaaggaaattaaggagagtgttcagacattctttaagcttgtaaataaatttttggctttgtgtgctgactctatcattattggtggagctaaacttaaagccttgaatttaggtgaaacatttgtcacgcactcaaagggattgtacagaaagtgtgttaaatccagagaagaaactggcctactcatgcctctaaaagccccaaaagaaattatcttcttagagggagaaacacttcccacagaagtgttaacagaggaagttgtcttgaaaactggtgatttacaaccattagaacaacctactagtgaagctgttgaagctccattggttggtacaccagtttgtattaacgggcttatgttgctcgaaatcaaagacacagaaaagtactgtgcccttgcacctaatatgatggtaacaaacaataccttcacactcaaaggcggtgcaccaacaaaggttacttttggtgatgacactgtgatagaagtgcaaggttacaagagtgtgaatatcacttttgaacttgatgaaaggattgataaagtacttaatgagaagtgctctgcctatacagttgaactcggtacagaagtaaatgagttcgcctgtgttgtggcagatgctgtcataaaaactttgcaaccagtatctgaattacttacaccactgggcattgatttagatgagtggagtatggctacatactacttatttgatgagtctggtgagtttaaattggcttcacatatgtattgttctttctaccctccagatgaggatgaagaagaaggtgattgtgaagaagaagagtttgagccatcaactcaatatgagtatggtactgaagatgattaccaaggtaaacctttggaatttggtgccacttctgctgctcttcaacctgaagaagagcaagaagaagattggttagatgatgatagtcaacaaactgttggtcaacaagacggcagtgaggacaatcagacaactactattcaaacaattgttgaggttcaacctcaattagagatggaacttacaccagttgttcagactattgaagtgaatagttttagtggttatttaaaacttactgacaatgtatacattaaaaatgcagacattgtggaagaagctaaaaaggtaaaaccaacagtggttgttaatgcagccaatgtttaccttaaacatggaggaggtgttgcaggagccttaaataaggctactaacaatgccatgcaagttgaatctgatgattacatagctactaatggaccacttaaagtgggtggtagttgtgttttaagcggacacaatcttgctaaacactgtcttcatgttgtcggcccaaatgttaacaaaggtgaagacattcaacttcttaagagtgcttatgaaaattttaatcagcacgaagttctacttgcaccattattatcagctggtatttttggtgctgaccctatacattctttaagagtttgtgtagatactgttcgcacaaatgtctacttagctgtctttgataaaaatctctatgacaaacttgtttcaagctttttggaaatgaagagtgaaaagcaagttgaacaaaagatcgctgagattcctaaagaggaagttaagccatttataactgaaagtaaaccttcagttgaacagagaaaacaagatgataagaaaatcaaagcttgtgttgaagaagttacaacaactctggaagaaactaagttcctcacagaaaacttgttactttatattgacattaatggcaatcttcatccagattctgccactcttgttagtgacattgacatcactttcttaaagaaagatgctccatatatagtgggtgatgttgttcaagagggtgttttaactgctgtggttatacctactaaaaaggctggtggcactactgaaatgctagcgaaagctttgagaaaagtgccaacagacaattatataaccacttacccgggtcagggtttaaatggttacactgtagaggaggcaaagacagtgcttaaaaagtgtaaaagtgccttttacattctaccatctattatctctaatgagaagcaagaaattcttggaactgtttcttggaatttgcgagaaatgcttgcacatgcagaagaaacacgcaaattaatgcctgtctgtgtggaaactaaagccatagtttcaactatacagcgtaaatataagggtattaaaatacaagagggtgtggttgattatggtgctagattttacttttacaccagtaaaacaactgtagcgtcacttatcaacacacttaacgatctaaatgaaactcttgttacaatgccacttggctatgtaacacatggcttaaatttggaagaagctgctcggtatatgagatctctcaaagtgccagctacagtttctgtttcttcacctgatgctgttacagcgtataatggttatcttacttcttcttctaaaacacctgaagaacattttattgaaaccatctcacttgctggttcctataaagattggtcctattctggacaatctacacaactaggtatagaatttcttaagagaggtgataaaagtgtatattacactagtaatcctaccacattccacctagatggtgaagttatcacctttgacaatcttaagacacttctttctttgagagaagtgaggactattaaggtgtttacaacagtagacaacattaacctccacacgcaagttgtggacatgtcaatgacatatggacaacagtttggtccaacttatttggatggagctgatgttactaaaataaaacctcataattcacatgaaggtaaaacattttatgttttacctaatgatgacactctacgtgttgaggcttttgagtactaccacacaactgatcctagttttctgggtaggtacatgtcagcattaaatcacactaaaaagtggaaatacccacaagttaatggtttaacttctattaaatgggcagataacaactgttatcttgccactgcattgttaacactccaacaaatagagttgaagtttaatccacctgctctacaagatgcttattacagagcaagggctggtgaagctgctaacttttgtgcacttatcttagcctactgtaataagacagtaggtgagttaggtgatgttagagaaacaatgagttacttgtttcaacatgccaatttagattcttgcaaaagagtcttgaacgtggtgtgtaaaacttgtggacaacagcagacaacccttaagggtgtagaagctgttatgtacatgggcacactttcttatgaacaatttaagaaaggtgttcagataccttgtacgtgtggtaaacaagctacaaaatatctagtacaacaggagtcaccttttgttatgatgtcagcaccacctgctcagtatgaacttaagcatggtacatttacttgtgctagtgagtacactggtaattaccagtgtggtcactataaacatataacttctaaagaaactttgtattgcatagacggtgctttacttacaaagtcctcagaatacaaaggtcctattacggatgttttctacaaagaaaacagttacacaacaaccataaaaccagttacttataaattggatggtgttgtttgtacagaaattgaccctaagttggacaattattataagaaagacaattcttatttcacagagcaaccaattgatcttgtaccaaaccaaccatatccaaacgcaagcttcgataattttaagtttgtatgtgataatatcaaatttgctgatgatttaaaccagttaactggttataagaaacctgcttcaagagagcttaaagttacatttttccctgacttaaatggtgatgtggtggctattgattataaacactacacaccctcttttaagaaaggagctaaattgttacataaacctattgtttggcatgttaacaatgcaactaataaagccacgtataaaccaaatacctggtgtatacgttgtctttggagcacaaaaccagttgaaacatcaaattcgtttgatgtactgaagtcagaggacgcgcagggaatggataatcttgcctgcgaagatctaaaaccagtctctgaagaagtagtggaaaatcctaccatacagaaagacgttcttgagtgtaatgtgaaaactaccgaagttgtaggagacattatacttaaaccagcaaataatagtttaaaaattacagaagaggttggccacacagatctaatggctgcttatgtagacaattctagtcttactattaagaaacctaatgaattatctagagtattaggtttgaaaacccttgctactcatggtttagctgctgttaatagtgtcccttgggatactatagctaattatgctaagccttttcttaacaaagttgttagtacaactactaacatagttacacggtgtttaaaccgtgtttgtactaattatatgccttatttctttactttattgctacaattgtgtacttttactagaagtacaaattctagaattaaagcatctatgccgactactatagcaaagaatactgttaagagtgtcggtaaattttgtctagaggcttcatttaattatttgaagtcacctaatttttctaaactgataaatattataatttggtttttactattaagtgtttgcctaggttctttaatctactcaaccgctgctttaggtgttttaatgtctaatttaggcatgccttcttactgtactggttacagagaaggctatttgaactctactaatgtcactattgcaacctactgtactggttctataccttgtagtgtttgtcttagtggtttagattctttagacacctatccttctttagaaactatacaaattaccatttcatcttttaaatgggatttaactgcttttggcttagttgcagagtggtttttggcatatattcttttcactaggtttttctatgtacttggattggctgcaatcatgcaattgtttttcagctattttgcagtacattttattagtaattcttggcttatgtggttaataattaatcttgtacaaatggccccgatttcagctatggttagaatgtacatcttctttgcatcattttattatgtatggaaaagttatgtgcatgttgtagacggttgtaattcatcaacttgtatgatgtgttacaaacgtaatagagcaacaagagtcgaatgtacaactattgttaatggtgttagaaggtccttttatgtctatgctaatggaggtaaaggcttttgcaaactacacaattggaattgtgttaattgtgatacattctgtgctggtagtacatttattagtgatgaagttgcgagagacttgtcactacagtttaaaagaccaataaatcctactgaccagtcttcttacatcgttgatagtgttacagtgaagaatggttccatccatctttactttgataaagctggtcaaaagacttatgaaagacattctctctctcattttgttaacttagacaacctgagagctaataacactaaaggttcattgcctattaatgttatagtttttgatggtaaatcaaaatgtgaagaatcatctgcaaaatcagcgtctgtttactacagtcagcttatgtgtcaacctatactgttactagatcaggcattagtgtctgatgttggtgatagtgcggaagttgcagttaaaatgtttgatgcttacgttaatacgttttcatcaacttttaacgtaccaatggaaaaactcaaaacactagttgcaactgcagaagctgaacttgcaaagaatgtgtccttagacaatgtcttatctacttttatttcagcagctcggcaagggtttgttgattcagatgtagaaactaaagatgttgttgaatgtcttaaattgtcacatcaatctgacatagaagttactggcgatagttgtaataactatatgctcacctataacaaagttgaaaacatgacaccccgtgaccttggtgcttgtattgactgtagtgcgcgtcatattaatgcgcaggtagcaaaaagtcacaacattgctttgatatggaacgttaaagatttcatgtcattgtctgaacaactacgaaaacaaatacgtagtgctgctaaaaagaataacttaccttttaagttgacatgtgcaactactagacaagttgttaatgttgtaacaacaaagatagcacttaagggtggtaaaattgttaataattggttgaagcagttaattaaagttacacttgtgttcctttttgttgctgctattttctatttaataacacctgttcatgtcatgtctaaacatactgacttttcaagtgaaatcataggatacaaggctattgatggtggtgtcactcgtgacatagcatctacagatacttgttttgctaacaaacatgctgattttgacacatggtttagccagcgtggtggtagttatactaatgacaaagcttgcccattgattgctgcagtcataacaagagaagtgggttttgtcgtgcctggtttgcctggcacgatattacgcacaactaatggtgactttttgcatttcttacctagagtttttagtgcagttggtaacatctgttacacaccatcaaaacttatagagtacactgactttgcaacatcagcttgtgttttggctgctgaatgtacaatttttaaagatgcttctggtaagccagtaccatattgttatgataccaatgtactagaaggttctgttgcttatgaaagtttacgccctgacacacgttatgtgctcatggatggctctattattcaatttcctaacacctaccttgaaggttctgttagagtggtaacaacttttgattctgagtactgtaggcacggcacttgtgaaagatcagaagctggtgtttgtgtatctactagtggtagatgggtacttaacaatgattattacagatctttaccaggagttttctgtggtgtagatgctgtaaatttacttactaatatgtttacaccactaattcaacctattggtgctttggacatatcagcatctatagtagctggtggtattgtagctatcgtagtaacatgccttgcctactattttatgaggtttagaagagcttttggtgaatacagtcatgtagttgcctttaatactttactattccttatgtcattcactgtactctgtttaacaccagtttactcattcttacctggtgtttattctgttatttacttgtacttgacattttatcttactaatgatgtttcttttttagcacatattcagtggatggttatgttcacacctttagtacctttctggataacaattgcttatatcatttgtatttccacaaagcatttctattggttctttagtaattacctaaagagacgtgtagtctttaatggtgtttcctttagtacttttgaagaagctgcgctgtgcacctttttgttaaataaagaaatgtatctaaagttgcgtagtgatgtgctattacctcttacgcaatataatagatacttagctctttataataagtacaagtattttagtggagcaatggatacaactagctacagagaagctgcttgttgtcatctcgcaaaggctctcaatgacttcagtaactcaggttctgatgttctttaccaaccaccacaaacctctatcacctcagctgttttgcagagtggttttagaaaaatggcattcccatctggtaaagttgagggttgtatggtacaagtaacttgtggtacaactacacttaacggtctttggcttgatgacgtagtttactgtccaagacatgtgatctgcacctctgaagacatgcttaaccctaattatgaagatttactcattcgtaagtctaatcataatttcttggtacaggctggtaatgttcaactcagggttattggacattctatgcaaaattgtgtacttaagcttaaggttgatacagccaatcctaagacacctaagtataagtttgttcgcattcaaccaggacagactttttcagtgttagcttgttacaatggttcaccatctggtgtttaccaatgtgctatgaggcccaatttcactattaagggttcattccttaatggttcatgtggtagtgttggttttaacatagattatgactgtgtctctttttgttacatgcaccatatggaattaccaactggagttcatgctggcacagacttagaaggtaacttttatggaccttttgttgacaggcaaacagcacaagcagctggtacggacacaactattacagttaatgttttagcttggttgtacgctgctgttataaatggagacaggtggtttctcaatcgatttaccacaactcttaatgactttaaccttgtggctatgaagtacaattatgaacctctaacacaagaccatgttgacatactaggacctctttctgctcaaactggaattgccgttttagatatgtgtgcttcattaaaagaattactgcaaaatggtatgaatggacgtaccatattgggtagtgctttattagaagatgaatttacaccttttgatgttgttagacaatgctcaggtgttactttccaaagtgcagtgaaaagaacaatcaagggtacacaccactggttgttactcacaattttgacttcacttttagttttagtccagagtactcaatggtctttgttcttttttttgtatgaaaatgcctttttaccttttgctatgggtattattgctatgtctgcttttgcaatgatgtttgtcaaacataagcatgcatttctctgtttgtttttgttaccttctcttgccactgtagcttattttaatatggtctatatgcctgctagttgggtgatgcgtattatgacatggttggatatggttgatactagtttgtctggttttaagctaaaagactgtgttatgtatgcatcagctgtagtgttactaatccttatgacagcaagaactgtgtatgatgatggtgctaggagagtgtggacacttatgaatgtcttgacactcgtttataaagtttattatggtaatgctttagatcaagccatttccatgtgggctcttataatctctgttacttctaactactcaggtgtagttacaactgtcatgtttttggccagaggtattgtttttatgtgtgttgagtattgccctattttcttcataactggtaatacacttcagtgtataatgctagtttattgtttcttaggctatttttgtacttgttactttggcctcttttgtttactcaaccgctactttagactgactcttggtgtttatgattacttagtttctacacaggagtttagatatatgaattcacagggactactcccacccaagaatagcatagatgccttcaaactcaacattaaattgttgggtgttggtggcaaaccttgtatcaaagtagccactgtacagtctaaaatgtcagatgtaaagtgcacatcagtagtcttactctcagttttgcaacaactcagagtagaatcatcatctaaattgtgggctcaatgtgtccagttacacaatgacattctcttagctaaagatactactgaagcctttgaaaaaatggtttcactactttctgttttgctttccatgcagggtgctgtagacataaacaagctttgtgaagaaatgctggacaacagggcaaccttacaagctatagcctcagagtttagttcccttccatcatatgcagcttttgctactgctcaagaagcttatgagcaggctgttgctaatggtgattctgaagttgttcttaaaaagttgaagaagtctttgaatgtggctaaatctgaatttgaccgtgatgcagccatgcaacgtaagttggaaaagatggctgatcaagctatgacccaaatgtataaacaggctagatctgaggacaagagggcaaaagttactagtgctatgcagacaatgcttttcactatgcttagaaagttggataatgatgcactcaacaacattatcaacaatgcaagagatggttgtgttcccttgaacataatacctcttacaacagcagccaaactaatggttgtcataccagactataacacatataaaaatacgtgtgatggtacaacatttacttatgcatcagcattgtgggaaatccaacaggttgtagatgcagatagtaaaattgttcaacttagtgaaattagtatggacaattcacctaatttagcatggcctcttattgtaacagctttaagggccaattctgctgtcaaattacagaataatgagcttagtcctgttgcactacgacagatgtcttgtgctgccggtactacacaaactgcttgcactgatgacaatgcgttagcttactacaacacaacaaagggaggtaggtttgtacttgcactgttatccgatttacaggatttgaaatgggctagattccctaagagtgatggaactggtactatctatacagaactggaaccaccttgtaggtttgttacagacacacctaaaggtcctaaagtgaagtatttatactttattaaaggattaaacaacctaaatagaggtatggtacttggtagtttagctgccacagtacgtctacaagctggtaatgcaacagaagtgcctgccaattcaactgtattatctttctgtgcttttgctgtagatgctgctaaagcttacaaagattatctagctagtgggggacaaccaatcactaattgtgttaagatgttgtgtacacacactggtactggtcaggcaataacagttacaccggaagccaatatggatcaagaatcctttggtggtgcatcgtgttgtctgtactgccgttgccacatagatcatccaaatcctaaaggattttgtgacttaaaaggtaagtatgtacaaatacctacaacttgtgctaatgaccctgtgggttttacacttaaaaacacagtctgtaccgtctgcggtatgtggaaaggttatggctgtagttgtgatcaactccgcgaacccatgcttcagtcagctgatgcacaatcgtttttaaacgggtttgcggtgtaagtgcagcccgtcttacaccgtgcggcacaggcactagtactgatgtcgtatacagggcttttgacatctacaatgataaagtagctggttttgctaaattcctaaaaactaattgttgtcgcttccaagaaaaggacgaagatgacaatttaattgattcttactttgtagttaagagacacactttctctaactaccaacatgaagaaacaatttataatttacttaaggattgtccagctgttgctaaacatgacttctttaagtttagaatagacggtgacatggtaccacatatatcacgtcaacgtcttactaaatacacaatggcagacctcgtctatgctttaaggcattttgatgaaggtaattgtgacacattaaaagaaatacttgtcacatacaattgttgtgatgatgattatttcaataaaaaggactggtatgattttgtagaaaacccagatatattacgcgtatacgccaacttaggtgaacgtgtacgccaagctttgttaaaaacagtacaattctgtgatgccatgcgaaatgctggtattgttggtgtactgacattagataatcaagatctcaatggtaactggtatgatttcggtgatttcatacaaaccacgccaggtagtggagttcctgttgtagattcttattattcattgttaatgcctatattaaccttgaccagggctttaactgcagagtcacatgttgacactgacttaacaaagccttacattaagtgggatttgttaaaatatgacttcacggaagagaggttaaaactctttgaccgttattttaaatattgggatcagacataccacccaaattgtgttaactgtttggatgacagatgcattctgcattgtgcaaactttaatgttttattctctacagtgttcccacctacaagttttggaccactagtgagaaaaatatttgttgatggtgttccatttgtagtttcaactggataccacttcagagagctaggtgttgtacataatcaggatgtaaacttacatagctctagacttagttttaaggaattacttgtgtatgctgctgaccctgctatgcacgctgcttctggtaatctattactagataaacgcactacgtgcttttcagtagctgcacttactaacaatgttgcttttcaaactgtcaaacccggtaattttaacaaagacttctatgactttgctgtgtctaagggtttctttaaggaaggaagttctgttgaattaaaacacttcttctttgctcaggatggtaatgctgctatcagcgattatgactactatcgttataatctaccaacaatgtgtgatatcagacaactactatttgtagttgaagttgttgataagtactttgattgttacgatggtggctgtattaatgctaaccaagtcatcgtcaacaacctagacaaatcagctggttttccatttaataaatggggtaaggctagactttattatgattcaatgagttatgaggatcaagatgcacttttcgcatatacaaaacgtaatgtcatccctactataactcaaatgaatcttaagtatgccattagtgcaaagaatagagctcgcaccgtagctggtgtctctatctgtagtactatgaccaatagacagtttcatcaaaaattattgaaatcaatagccgccactagaggagctactgtagtaattggaacaagcaaattctatggtggttggcacaacatgttaaaaactgtttatagtgatgtagaaaaccctcaccttatgggttgggattatcctaaatgtgatagagccatgcctaacatgcttagaattatggcctcacttgttcttgctcgcaaacatacaacgtgttgtagcttgtcacaccgtttctatagattagctaatgagtgtgctcaagtattgagtgaaatggtcatgtgtggcggttcactatatgttaaaccaggtggaacctcatcaggagatgccacaactgcttatgctaatagtgtttttaacatttgtcaagctgtcacggccaatgttaatgcacttttatctactgatggtaacaaaattgccgataagtatgtccgcaatttacaacacagactttatgagtgtctctatagaaatagagatgttgacacagactttgtgaatgagttttacgcatatttgcgtaaacatttctcaatgatgatactctctgacgatgctgttgtgtgtttcaatagcacttatgcatctcaaggtctagtggctagcataaagaactttaagtcagttctttattatcaaaacaatgtttttatgtctgaagcaaaatgttggactgagactgaccttactaaaggacctcatgaattttgctctcaacatacaatgctagttaaacagggtgatgattatgtgtaccttccttacccagatccatcaagaatcctaggggccggctgttttgtagatgatatcgtaaaaacagatggtacacttatgattgaacggttcgtgtctttagctatagatgcttacccacttactaaacatcctaatcaggagtatgctgatgtctttcatttgtacttacaatacataagaaagctacatgatgagttaacaggacacatgttagacatgtattctgttatgcttactaatgataacacttcaaggtattgggaacctgagttttatgaggctatgtacacaccgcatacagtcttacaggctgttggggcttgtgttctttgcaattcacagacttcattaagatgtggtgcttgcatacgtagaccattcttatgttgtaaatgctgttacgaccatgtcatatcaacatcacataaattagtcttgtctgttaatccgtatgtttgcaatgctccaggttgtgatgtcacagatgtgactcaactttacttaggaggtatgagctattattgtaaatcacataaaccacccattagttttccattgtgtgctaatggacaagtttttggtttatataaaaatacatgtgttggtagcgataatgttactgactttaatgcaattgcaacatgtgactggacaaatgctggtgattacattttagctaacacctgtactgaaagactcaagctttttgcagcagaaacgctcaaagctactgaggagacatttaaactgtcttatggtattgctactgtacgtgaagtgctgtctgacagagaattacatctttcatgggaagttggtaaacctagaccaccacttaaccgaaattatgtctttactggttatcgtgtaactaaaaacagtaaagtacaaataggagagtacacctttgaaaaaggtgactatggtgatgctgttgtttaccgaggtacaacaacttacaaattaaatgttggtgattattttgtgctgacatcacatacagtaatgccattaagtgcacctacactagtgccacaagagcactatgttagaattactggcttatacccaacactcaatatctcagatgagttttctagcaatgttgcaaattatcaaaaggttggtatgcaaaagtattctacactccagggaccacctggtactggtaagagtcattttgctattggcctagctctctactacccttctgctcgcatagtgtatacagcttgctctcatgccgctgttgatgcactatgtgagaaggcattaaaatatttgcctatagataaatgtagtagaattatacctgcacgtgctcgtgtagagtgttttgataaattcaaagtgaattcaacattagaacagtatgtcttttgtactgtaaatgcattgcctgagacgacagcagatatagttgtctttgatgaaatttcaatggccacaaattatgatttgagtgttgtcaatgccagattacgtgctaagcactatgtgtacattggcgaccctgctcaattacctgcaccacgcacattgctaactaagggcacactagaaccagaatatttcaattcagtgtgtagacttatgaaaactataggtccagacatgttcctcggaacttgtcggcgttgtcctgctgaaattgttgacactgtgagtgctttggtttatgataataagcttaaagcacataaagacaaatcagctcaatgctttaaaatgttttataagggtgttatcacgcatgatgtttcatctgcaattaacaggccacaaataggcgtggtaagagaattccttacacgtaaccctgcttggagaaaagctgtctttatttcaccttataattcacagaatgctgtagcctcaaagattttgggactaccaactcaaactgttgattcatcacagggctcagaatatgactatgtcatattcactcaaaccactgaaacagctcactcttgtaatgtaaacagatttaatgttgctattaccagagcaaaagtaggcatactttgcataatgtctgatagagacctttatgacaagttgcaatttacaagtcttgaaattccacgtaggaatgtggcaactttacaagctgaaaatgtaacaggactctttaaagattgtagtaaggtaatcactgggttacatcctacacaggcacctacacacctcagtgttgacactaaattcaaaactgaaggtttatgtgttgacatacctggcatacctaaggacatgacctatagaagactcatctctatgatgggttttaaaatgaattatcaagttaatggttaccctaacatgtttatcacccgcgaagaagctataagacatgtacgtgcatggattggcttcgatgtcgaggggtgtcatgctactagagaagctgttggtaccaatttacctttacagctaggtttttctacaggtgttaacctagttgctgtacctacaggttatgttgatacacctaataatacagatttttccagagttagtgctaaaccaccgcctggagatcaatttaaacacctcataccacttatgtacaaaggacttccttggaatgtagtgcgtataaagattgtacaaatgttaagtgacacacttaaaaatctctctgacagagtcgtatttgtcttatgggcacatggctttgagttgacatctatgaagtattttgtgaaaataggacctgagcgcacctgttgtctatgtgatagacgtgccacatgcttttccactgcttcagacacttatgcctgttggcatcattctattggatttgattacgtctataatccgtttatgattgatgttcaacaatggggttttacaggtaacctacaaagcaaccatgatctgtattgtcaagtccatggtaatgcacatgtagctagttgtgatgcaatcatgactaggtgtctagctgtccacgagtgctttgttaagcgtgttgactggactattgaatatcctataattggtgatgaactgaagattaatgcggcttgtagaaaggttcaacacatggttgttaaagctgcattattagcagacaaattcccagttcttcacgacattggtaaccctaaagctattaagtgtgtacctcaagctgatgtagaatggaagttctatgatgcacagccttgtagtgacaaagcttataaaatagaagaattattctattcttatgccacacattctgacaaattcacagatggtgtatgcctattttggaattgcaatgtcgatagatatcctgctaattccattgtttgtagatttgacactagagtgctatctaaccttaacttgcctggttgtgatggtggcagtttgtatgtaaataaacatgcattccacacaccagcttttgataaaagtgcttttgttaatttaaaacaattaccatttttctattactctgacagtccatgtgagtctcatggaaaacaagtagtgtcagatatagattatgtaccactaaagtctgctacgtgtataacacgttgcaatttaggtggtgctgtctgtagacatcatgctaatgagtacagattgtatctcgatgcttataacatgatgatctcagctggctttagcttgtgggtttacaaacaatttgatacttataacctctggaacacttttacaagacttcagagtttagaaaatgtggcttttaatgttgtaaataagggacactttgatggacaacagggtgaagtaccagtttctatcattaataacactgtttacacaaaagttgatggtgttgatgtagaattgtttgaaaataaaacaacattacctgttaatgtagcatttgagctttgggctaagcgcaacattaaaccagtaccagaggtgaaaatactcaataatttgggtgtggacattgctgctaatactgtgatctgggactacaaaagagatgctccagcacatatatctactattggtgtttgttctatgactgacatagccaagaaaccaactgaaacgatttgtgcaccactcactgtcttttttgatggtagagttgatggtcaagtagacttatttagaaatgcccgtaatggtgttcttattacagaaggtagtgttaaaggtttacaaccatctgtaggtcccaaacaagctagtcttaatggagtcacattaattggagaagccgtaaaaacacagttcaattattataagaaagttgatggtgttgtccaacaattacctgaaacttactttactcagagtagaaatttacaagaatttaaacccaggagtcaaatggaaattgatttcttagaattagctatggatgaattcattgaacggtataaattagaaggctatgccttcgaacatatcgtttatggagattttagtcatagtcagttaggtggtttacatctactgattggactagctaaacgttttaaggaatcaccttttgaattagaagattttattcctatggacagtacagttaaaaactatttcataacagatgcgcaaacaggttcatctaagtgtgtgtgttctgttattgatttattacttgatgattttgttgaaataataaaatcccaagatttatctgtagtttctaaggttgtcaaagtgactattgactatacagaaatttcatttatgctttggtgtaaagatggccatgtagaaacattttacccaaaattacaatctagtcaagcgtggcaaccgggtgttgctatgcctaatctttacaaaatgcaaagaatgctattagaaaagtgtgaccttcaaaattatggtgatagtgcaacattacctaaaggcataatgatgaatgtcgcaaaatatactcaactgtgtcaatatttaaacacattaacattagctgtaccctataatatgagagttatacattttggtgctggttctgataaaggagttgcaccaggtacagctgttttaagacagtggttgcctacgggtacgctgcttgtcgattcagatcttaatgactttgtctctgatgcagattcaactttgattggtgattgtgcaactgtacatacagctaataaatgggatctcattattagtgatatgtacgaccctaagactaaaaatgttacaaaagaaaatgactctaaagagggttttttcacttacatttgtgggtttatacaacaaaagctagctcttggaggttccgtggctataaagataacagaacattcttggaatgctgatctttataagctcatgggacacttcgcatggtggacagcctttgttactaatgtgaatgcgtcatcatctgaagcatttttaattggatgtaattatcttggcaaaccacgcgaacaaatagatggttatgtcatgcatgcaaattacatattttggaggaatacaaatccaattcagttgtcttcctattctttatttgacatgagtaaatttccccttaaattaaggggtactgctgttatgtctttaaaagaaggtcaaatcaatgatatgattttatctcttcttagtaaaggtagacttataattagagaaaacaacagagttgttatttctagtgatgttcttgttaacaactaaacgaacaatgtttgtttttcttgttttattgccactagtctctagtcagtgtgttaatcttacaaccagaactcaattaccccctgcatacactaattctttcacacgtggtgtttattaccctgacaaagttttcagatcctcagttttacattcaactcaggacttgttcttacctttcttttccaatgttacttggttccatgctatacatgtctctgggaccaatggtactaagaggtttgataaccctgtcctaccatttaatgatggtgtttattttgcttccactgagaagtctaacataataagaggctggatttttggtactactttagattcgaagacccagtccctacttattgttaataacgctactaatgttgttattaaagtctgtgaatttcaattttgtaatgatccatttttgggtgtttattaccacaaaaacaacaaaagttggatggaaagtgagttcagagtttattctagtgcgaataattgcacttttgaatatgtctctcagccttttcttatggaccttgaaggaaaacagggtaatttcaaaaatcttagggaatttgtgtttaagaatattgatggttattttaaaatatattctaagcacacgcctattaatttagtgcgtgatctccctcagggtttttcggctttagaaccattggtagatttgccaataggtattaacatcactaggtttcaaactttacttgctttacatagaagttatttgactcctggtgattcttcttcaggttggacagctggtgctgcagcttattatgtgggttatcttcaacctaggacttttctattaaaatataatgaaaatggaaccattacagatgctgtagactgtgcacttgaccctctctcagaaacaaagtgtacgttgaaatccttcactgtagaaaaaggaatctatcaaacttctaactttagagtccaaccaacagaatctattgttagatttcctaatattacaaacttgtgcccttttggtgaagtttttaacgccaccagatttgcatctgtttatgcttggaacaggaagagaatcagcaactgtgttgctgattattctgtcctatataattccgcatcattttccacttttaagtgttatggagtgtctcctactaaattaaatgatctctgctttactaatgtctatgcagattcatttgtaattagaggtgatgaagtcagacaaatcgctccagggcaaactggaaagattgctgattataattataaattaccagatgattttacaggctgcgttatagcttggaattctaacaatcttgattctaaggttggtggtaattataattacctgtatagattgtttaggaagtctaatctcaaaccttttgagagagatatttcaactgaaatctatcaggccggtagcacaccttgtaatggtgttgaaggttttaattgttactttcctttacaatcatatggtttccaacccactaatggtgttggttaccaaccatacagagtagtagtactttcttttgaacttctacatgcaccagcaactgtttgtggacctaaaaagtctactaatttggttaaaaacaaatgtgtcaatttcaacttcaatggtttaacaggcacaggtgttcttactgagtctaacaaaaagtttctgcctttccaacaatttggcagagacattgctgacactactgatgctgtccgtgatccacagacacttgagattcttgacattacaccatgttcttttggtggtgtcagtgttataacaccaggaacaaatacttctaaccaggttgctgttctttatcaggatgttaactgcacagaagtccctgttgctattcatgcagatcaacttactcctacttggcgtgtttattctacaggttctaatgtttttcaaacacgtgcaggctgtttaataggggctgaacatgtcaacaactcatatgagtgtgacatacccattggtgcaggtatatgcgctagttatcagactcagactaattctcctcggcgggcacgtagtgtagctagtcaatccatcattgcctacactatgtcacttggtgcagaaaattcagttgcttactctaataactctattgccatacccacaaattttactattagtgttaccacagaaattctaccagtgtctatgaccaagacatcagtagattgtacaatgtacatttgtggtgattcaactgaatgcagcaatcttttgttgcaatatggcagtttttgtacacaattaaaccgtgctttaactggaatagctgttgaacaagacaaaaacacccaagaagtttttgcacaagtcaaacaaatttacaaaacaccaccaattaaagattttggtggttttaatttttcacaaatattaccagatccatcaaaaccaagcaagaggtcatttattgaagatctacttttcaacaaagtgacacttgcagatgctggcttcatcaaacaatatggtgattgccttggtgatattgctgctagagacctcatttgtgcacaaaagtttaacggccttactgttttgccacctttgctcacagatgaaatgattgctcaatacacttctgcactgttagcgggtacaatcacttctggttggacctttggtgcaggtgctgcattacaaataccatttgctatgcaaatggcttataggtttaatggtattggagttacacagaatgttctctatgagaaccaaaaattgattgccaaccaatttaatagtgctattggcaaaattcaagactcactttcttccacagcaagtgcacttggaaaacttcaagatgtggtcaaccaaaatgcacaagctttaaacacgcttgttaaacaacttagctccaattttggtgcaatttcaagtgttttaaatgatatcctttcacgtcttgacaaagttgaggctgaagtgcaaattgataggttgatcacaggcagacttcaaagtttgcagacatatgtgactcaacaattaattagagctgcagaaatcagagcttctgctaatcttgctgctactaaaatgtcagagtgtgtacttggacaatcaaaaagagttgatttttgtggaaagggctatcatcttatgtccttccctcagtcagcacctcatggtgtagtcttcttgcatgtgacttatgtccctgcacaagaaaagaacttcacaactgctcctgccatttgtcatgatggaaaagcacactttcctcgtgaaggtgtctttgtttcaaatggcacacactggtttgtaacacaaaggaatttttatgaaccacaaatcattactacagacaacacatttgtgtctggtaactgtgatgttgtaataggaattgtcaacaacacagtttatgatcctttgcaacctgaattagactcattcaaggaggagttagataaatattttaagaatcatacatcaccagatgttgatttaggtgacatctctggcattaatgcttcagttgtaaacattcaaaaagaaattgaccgcctcaatgaggttgccaagaatttaaatgaatctctcatcgatctccaagaacttggaaagtatgagcagtatataaaatggccatggtacatttggctaggttttatagctggcttgattgccatagtaatggtgacaattatgctttgctgtatgaccagttgctgtagttgtctcaagggctgttgttcttgtggatcctgctgcaaatttgatgaagacgactctgagccagtgctcaaaggagtcaaattacattacacataaacgaacttatggatttgtttatgagaatcttcacaattggaactgtaactttgaagcaaggtgaaatcaaggatgctactccttcagattttgttcgcgctactgcaacgataccgatacaagcctcactccctttcggatggcttattgttggcgttgcacttcttgctgtttttcagagcgcttccaaaatcataaccctcaaaaagagatggcaactagcactctccaagggtgttcactttgtttgcaacttgctgttgttgtttgtaacagtttactcacaccttttgctcgttgctgctggccttgaagccccttttctctatctttatgctttagtctacttcttgcagagtataaactttgtaagaataataatgaggctttggctttgctggaaatgccgttccaaaaacccattactttatgatgccaactattttctttgctggcatactaattgttacgactattgtataccttacaatagtgtaacttcttcaattgtcattacttcaggtgatggcacaacaagtcctatttctgaacatgactaccagattggtggttatactgaaaaatgggaatctggagtaaaagactgtgttgtattacacagttacttcacttcagactattaccagctgtactcaactcaattgagtacagacactggtgttgaacatgttaccttcttcatctacaataaaattgttgatgagcctgaagaacatgtccaaattcacacaatcgacggttcatccggagttgttaatccagtaatggaaccaatttatgatgaaccgacgacgactactagcgtgcctttgtaagcacaagctgatgagtacgaacttatgtactcattcgtttcggaagagacaggtacgttaatagttaatagcgtacttctttttcttgctttcgtggtattcttgctagttacactagccatccttactgcgcttcgattgtgtgcgtactgctgcaatattgttaacgtgagtcttgtaaaaccttctttttacgtttactctcgtgttaaaaatctgaattcttctagagttcctgatcttctggtctaaacgaactaaatattatattagtttttctgtttggaactttaattttagccatggcagattccaacggtactattaccgttgaagagcttaaaaagctccttgaacaatggaacctagtaataggtttcctattccttacatggatttgtcttctacaatttgcctatgccaacaggaataggtttttgtatataattaagttaattttcctctggctgttatggccagtaactttagcttgttttgtgcttgctgctgtttacagaataaattggatcaccggtggaattgctatcgcaatggcttgtcttgtaggcttgatgtggctcagctacttcattgcttctttcagactgtttgcgcgtacgcgttccatgtggtcattcaatccagaaactaacattcttctcaacgtgccactccatggcactattctgaccagaccgcttctagaaagtgaactcgtaatcggagctgtgatccttcgtggacatcttcgtattgctggacaccatctaggacgctgtgacatcaaggacctgcctaaagaaatcactgttgctacatcacgaacgctttcttattacaaattgggagcttcgcagcgtgtagcaggtgactcaggttttgctgcatacagtcgctacaggattggcaactataaattaaacacagaccattccagtagcagtgacaatattgctttgcttgtacagtaagtgacaacagatgtttcatctcgttgactttcaggttactatagcagagatattactaattattatgaggacttttaaagtttccatttggaatcttgattacatcataaacctcataattaaaaatttatctaagtcactaactgagaataaatattctcaattagatgaagagcaaccaatggagattgattaaacgaacatgaaaattattcttttcttggcactgataacactcgctacttgtgagctttatcactaccaagagtgtgttagaggtacaacagtacttttaaaagaaccttgctcttctggaacatacgagggcaattcaccatttcatcctctagctgataacaaatttgcactgacttgctttagcactcaatttgcttttgcttgtcctgacggcgtaaaacacgtctatcagttacgtgccagatcagtttcacctaaactgttcatcagacaagaggaagttcaagaactttactctccaatttttcttattgttgcggcaatagtgtttataacactttgcttcacactcaaaagaaagacagaatgattgaactttcattaattgacttctatttgtgctttttagcctttctgctattccttgttttaattatgcttattatcttttggttctcacttgaactgcaagatcataatgaaacttgtcacgcctaaacgaacatgaaatttcttgttttcttaggaatcatcacaactgtagctgcatttcaccaagaatgtagtttacagtcatgtactcaacatcaaccatatgtagttgatgacccgtgtcctattcacttctattctaaatggtatattagagtaggagctagaaaatcagcacctttaattgaattgtgcgtggatgaggctggttctaaatcacccattcagtacatcgatatcggtaattatacagtttcctgtttaccttttacaattaattgccaggaacctaaattgggtagtcttgtagtgcgttgttcgttctatgaagactttttagagtatcatgacgttcgtgttgttttagatttcatctaaacgaacaaactaaaatgtctgataatggaccccaaaatcagcgaaatgcaccccgcattacgtttggtggaccctcagattcaactggcagtaaccagaatggagaacgcagtggggcgcgatcaaaacaacgtcggccccaaggtttacccaataatactgcgtcttggttcaccgctctcactcaacatggcaaggaagaccttaaattccctcgaggacaaggcgttccaattaacaccaatagcagtccagatgaccaaattggctactaccgaagagctaccagacgaattcgtggtggtgacggtaaaatgaaagatctcagtccaagatggtatttctactacctaggaactgggccagaagctggacttccctatggtgctaacaaagacggcatcatatgggttgcaactgagggagccttgaatacaccaaaagatcacattggcacccgcaatcctgctaacaatgctgcaatcgtgctacaacttcctcaaggaacaacattgccaaaaggcttctacgcagaagggagcagaggcggcagtcaagcctcttctcgttcctcatcacgtagtcgcaacagttcaagaaattcaactccaggcagcagtaggggaacttctcctgctagaatggctggcaatggcggtgatgctgctcttgctttgctgctgcttgacagattgaaccagcttgagagcaaaatgtctggtaaaggccaacaacaacaaggccaaactgtcactaagaaatctgctgctgaggcttctaagaagcctcggcaaaaacgtactgccactaaagcatacaatgtaacacaagctttcggcagacgtggtccagaacaaacccaaggaaattttggggaccaggaactaatcagacaaggaactgattacaaacattggccgcaaattgcacaatttgcccccagcgcttcagcgttcttcggaatgtcgcgcattggcatggaagtcacaccttcgggaacgtggttgacctacacaggtgccatcaaattggatgacaaagatccaaatttcaaagatcaagtcattttgctgaataagcatattgacgcatacaaaacattcccaccaacagagcctaaaaaggacaaaaagaagaaggctgatgaaactcaagccttaccgcagagacagaagaaacagcaaactgtgactcttcttcctgctgcagatttggatgatttctccaaacaattgcaacaatccatgagcagtgctgactcaactcaggcctaaactcatgcagaccacacaaggcagatgggctatataaacgttttcgcttttccgtttacgatatatagtctactcttgtgcagaatgaattctcgtaactacatagcacaagtagatgtagttaactttaatctcacatagcaatctttaatcagtgtgtaacattagggaggacttgaaagagccaccacattttcaccgaggccacgcggagtacgatcgagtgtacagtgaacaatgctagggagagctgcctatatggaagagccctaatgtgtaaaattaattttagtagtgctatccccatgtgattttaatagcttcttaggagaatgacaaaaaaaaaaaa

SEQ ID NO: 47 - protein, 1273 aa, Severe acute respiratory syndrome coronavirus 2
MFVFLVLLPLVSSQCVNLTTRTQLPPAYTNSFTRGVYYPDKVFRSSVLHSTQDLFLPFFSNVTWFHAIHVSGTNGTKRFDNPVLPFNDGVYFASTEKSNIIRGWIFGTTLDSKTQSLLIVNNATNVVIKVCEFQFCNDPFLGVYYHKNNKSWMESEFRVYSSANNCTFEYVSQPFLMDLEGKQGNFKNLREFVFKNIDGYFKIYSKHTPINLVRDLPQGFSALEPLVDLPIGINITRFQTLLALHRSYLTPGDSSSGWTAGAAAYYVGYLQPRTFLLKYNENGTITDAVDCALDPLSETKCTLKSFTVEKGIYQTSNFRVQPTESIVRFPNITNLCPFGEVFNATRFASVYAWNRKRISNCVADYSVLYNSASFSTFKCYGVSPTKLNDLCFTNVYADSFVIRGDEVRQIAPGQTGKIADYNYKLPDDFTGCVIAWNSNNLDSKVGGNYNYLYRLFRKSNLKPFERDISTEIYQAGSTPCNGVEGFNCYFPLQSYGFQPTNGVGYQPYRVVVLSFELLHAPATVCGPKKSTNLVKNKCVNFNFNGLTGTGVLTESNKKFLPFQQFGRDIADTTDAVRDPQTLEILDITPCSFGGVSVITPGTNTSNQVAVLYQDVNCTEVPVAIHADQLTPTWRVYSTGSNVFQTRAGCLIGAEHVNNSYECDIPIGAGICASYQTQTNSPRRARSVASQSIIAYTMSLGAENSVAYSNNSIAIPTNFTISVTTEILPVSMTKTSVDCTMYICGDSTECSNLLLQYGSFCTQLNRALTGIAVEQDKNTQEVFAQVKQIYKTPPIKDFGGFNFSQILPDPSKPSKRSFIEDLLFNKVTLADAGFIKQYGDCLGDIAARDLICAQKFNGLTVLPPLLTDEMIAQYTSALLAGTITSGWTFGAGAALQIPFAMQMAYRFNGIGVTQNVLYENQKLIANQFNSAIGKIQDSLSSTASALGKLQDVVNQNAQALNTLVKQLSSNFGAISSVLNDILSRLDKVEAEVQIDRLITGRLQSLQTYVTQQLIRAAEIRASANLAATKMSECVLGQSKRVDFCGKGYHLMSFPQSAPHGVVFLHVTYVPAQEKNFTTAPAICHDGKAHFPREGVFVSNGTHWFVTQRNFYEPQIITTDNTFVSGNCDVVIGIVNNTVYDPLQPELDSFKEELDKYFKNHTSPDVDLGDISGINASVVNIQKEIDRLNEVAKNLNESLIDLQELGKYEQYIKWPWYIWLGFIAGLIAIVMVTIMLCCMTSCCSCLKGCCSCGSCCKFDEDDSEPVLKGVKLHYT

SEQ ID NO: 48 - protein, 222 aa, Severe acute respiratory syndrome coronavirus 2
MADSNGTITVEELKKLLEQWNLVIGFLFLTWICLLQFAYANRNRFLYIIKLIFLWLLWPVTLACFVLAAVYRINWITGGIAIAMACLVGLMWLSYFIASFRLFARTRSMWSFNPETNILLNVPLHGTILTRPLLESELVIGAVILRGHLRIAGHHLGRCDIKDLPKEITVATSRTLSYYKLGASQRVAGDSGFAAYSRYRIGNYKLNTDHSSSSDNIALLVQ

SEQ ID NO: 49 - protein, 419 aa, Severe acute respiratory syndrome coronavirus 2
MSDNGPQNQRNAPRITFGGPSDSTGSNQNGERSGARSKQRRPQGLPNNTASWFTALTQHGKEDLKFPRGQGVPINTNSSPDDQIGYYRRATRRIRGGDGKMKDLSPRWYFYYLGTGPEAGLPYGANKDGIIWVATEGALNTPKDHIGTRNPANNAAIVLQLPQGTTLPKGFYAEGSRGGSQASSRSSSRSRNSSRNSTPGSSRGTSPARMAGNGGDAALALLLLDRLNQLESKMSGKGQQQQGQTVTKKSAAEASKKPRQKRTATKAYNVTQAFGRRGPEQTQGNFGDQELIRQGTDYKHWPQIAQFAPSASAFFGMSRIGMEVTPSGTWLTYTGAIKLDDKDPNFKDQVILLNKHIDAYKTFPPTEPKKDKKKKADETQALPQRQKKQQTVTLLPAADLDDFSKQLQQSMSSADSTQA

SEQ ID NO: 50 - DNA, 3876 bp, Artificial Sequence
  Description of Artificial Sequence: Synthetic polynucleotide
agcggccgcaaaattgaaattttattttttttttttggaatataaataatgttcgtgttcctagtcctactaccgctagtctcttcccagtgtgtaaacctaacaacgagaacacaactaccaccggcgtacaccaattctttcacaagaggagtatattacccggacaaggtgttcagatcctccgtactacattctacccaggacctattcctaccgttcttctctaacgtaacatggttccacgcgatccatgtctctggaacaaacggaacgaagagattcgataacccggtcttgccgttcaacgatggtgtatactttgcgtccaccgagaagtccaacatcatcagaggatggatcttcggaaccaccttggattctaagacccagtccttgctaatcgtcaacaacgcgaccaacgtcgtcatcaaagtctgcgaattccagttctgtaacgacccgtttttgggagtctactaccacaagaacaacaagtcctggatggaatccgagttcagagtctactcttccgcgaacaactgcaccttcgaatatgtatctcagccgttcctaatggacctagagggaaagcagggaaacttcaagaacctaagagagttcgtattcaagaacatcgacggatacttcaagatctactccaagcacaccccgatcaacctagttagagatctaccgcaaggattctctgcgctagaaccgttagtagatttgccgatcggaatcaacatcaccagattccagacactactagcgctacacagatcttacctaacgccgggagattcttcttctggatggactgctggtgctgcggcttattatgtaggatacctacagccgagaaccttcctattgaagtacaacgaaaacggaaccatcaccgatgccgtagattgtgctctagatccgctatccgaaacgaagtgcaccctaaagtctttcaccgtcgagaagggaatctaccagacctccaactttagagtacagccgaccgaatccatcgtcagatttccgaacatcacgaacctatgtccgttcggagaagtgttcaacgcgacaagatttgcgtctgtctatgcgtggaacagaaaaagaatcagtaactgcgtcgcggactactccgtcctatacaactctgcctctttctccacgttcaaatgctacggtgtatccccgacaaagctaaacgatctatgcttcaccaacgtctacgcggactccttcgtaatcagaggagatgaagttagacagattgcgccgggacaaactggaaagatcgcggattataactacaagctaccggacgacttcaccggatgtgtaattgcgtggaattcgaacaacctagactccaaagtcggaggaaactacaactacttgtacagactattcagaaagtccaacctaaagccgttcgagagagacatctccaccgaaatctatcaggctggatctacaccgtgtaatggtgtcgaaggattcaactgctacttcccgctacagtcttacggatttcaaccgacaaacggtgtaggatatcagccgtacagagtcgtcgtactatccttcgaactactacatgctccggcgacagtatgtggaccgaaaaagtctaccaacctagtcaagaacaaatgcgtcaactttaacttcaacggactaaccggaaccggtgtcctaaccgaatctaacaagaagtttctaccgttccagcagttcggaagagatatcgcggatacaacagacgctgtcagagatccgcaaaccttggagatcctagatatcaccccgtgttctttcggtggtgtctctgtaattactccgggaacgaacacctccaatcaagtagcggtactataccaggacgtgaactgtacagaagtaccggtagctattcacgcggatcaactaacaccaacttggagagtgtactccaccggatctaacgtattccaaacaagagcgggatgtctaatcggagcggaacacgtaaacaactcctacgaatgtgatatcccgattggagcgggaatctgtgcgtcttaccaaacacaaacaaactccccgagaagagcgagatctgtagcctctcaatctattatcgcctacaccatgtccttgggagccgaaaattctgtcgcgtactccaacaattctatcgcgatcccgacaaacttcaccatctctgtaacaaccgagatcctaccggtgtctatgaccaagacatctgtcgattgcaccatgtacatctgcggagattccaccgagtgctccaacctactactacagtacggatctttctgtacccagctaaacagagcgttgactggaatcgctgtagagcaggataagaacacccaagaggtattcgcgcaagtcaagcagatctataagactccgccgatcaaggacttcggaggttttaacttctctcagatcttgccggatccgtccaaaccgtctaagagatctttcatcgaggacctactattcaacaaagtcaccctagctgacgcgggattcatcaaacaatacggagattgcttgggagacattgcggcgagagatctaatttgcgcgcagaagtttaacggattgacagtactaccgccgctactaaccgatgagatgattgcgcagtacacgtctgctctattggcgggaacaattacaagtggatggacatttggagccggtgccgctctacaaattccgtttgctatgcaaatggcgtacagattcaacggaatcggagtaacccagaacgtcttgtacgagaaccagaagctaatcgcgaaccagttcaattccgcgatcggaaagatccaggacagtctatcttctactgcttcggcgttgggaaagctacaggatgtagtaaatcaaaacgcgcaggcgctaaacaccttggtcaagcaactatcctctaacttcggagcgatctcgtccgtcctaaacgacatcttatccagactagataaggtcgaagcggaggtccagatcgatagactaatcactggaagattgcagtccctacagacctacgtaacacagcaactaattagagcggcggagattagagcctctgctaatctagctgcgaccaagatgtccgaatgtgtcttgggacaatccaagagagtcgacttttgcggaaagggataccacctaatgtcttttccacaatctgcgccgcatggtgtcgtattcctacatgtaacatatgtgccggcgcaagaaaagaactttacaacagctccagcgatctgccatgatggaaaagctcattttccgagagagggagtctttgtctctaacggaactcattggttcgtcacccagagaaacttttacgagccgcagatcatcaccaccgacaacacatttgtttcgggaaactgcgacgtggtcatcggaatcgtaaacaataccgtctacgatccgttgcagccggaactagactccttcaaagaagagttggacaagtactttaagaaccacacctctccggatgtcgacttgggagatatttctggaatcaacgcgtccgtcgtcaacatccagaaagaaatcgatagattgaacgaggtcgcgaagaacttgaacgagtccctaatcgacctacaagagctaggaaaatacgagcagtacatcaagtggccgtggtacatttggctaggattcattgctggactaattgcgatcgtcatggtcaccatcatgctatgctgtatgacctcctgttgctcctgtctaaagggatgttgttcctgcggatcctgttgcaagttcgatgaagatgatagtgaaccggtcctaaagggtgtcaagctacactacacataaaagctt

SEQ ID NO: 51 - DNA, 880 bp, Artificial Sequence
  Description of Artificial Sequence: Synthetic polynucleotide
tttggctagtcaagatgatgaatcttcattatctgatatattgcaaatcactcaatatctagactttctgttattattattgatccaatcaaaaaataaattagaagccgtgggtcattgttatgaatctctttcagaggaatacagacaattgacaaaattcacagactttcaagattttaaaaaactgtttaacaaggtccctattgttacagatggaagggtcaaacttaataaaggatatttgttcgactttgtgattagtttgatgcgattcaaaaaagaatcctctctagctaccaccgcaatagatcctattagatacatagatcctcgtcgtgatatcgcattttctaacgtgatggatatattaaagttgaataaagtgaacaataattaattctttattgtcatcggatcccacgatgtgctagactctctcgtctacgcggccgcaactgagagaccaagcttgtcgactattatattttttatctaaaaaactaaaaataaacattgattaaattttaatataatacttaaaaatggatgttgtgtcgttagataaaccgtttatgtattttgaggaaattgataatgagttagattacgaaccagaaagtgcaaatgaggtcgcaaaaaaactaccgtatcaaggacagttaaaactattactaggagaattattttttcttagtaagttacagcgacacggtatattagatggtgccaccgtagtgtatataggatcggctcctggtacacatatacgttatttgagagatcatttctataatttaggaatgattatcaaatggatgctaattgacggacgccatcatgatcctattctaaatggattgcgtgatgtgactctagt

SEQ ID NO: 52 - DNA, 1065 bp, Artificial Sequence
  Description of Artificial Sequence: Synthetic polynucleotide
gagtattctaggtgtttctatagaatgtaagaagtcatcgacattacttacttttttgaccgtgcgtaaaatgacccgagtatttaatagatttccagatatggcttattatcgaggagactgtttaaaagccgtttatgtaacaatgacttataaaaatactaaaactggagagactgattacacgtacctctctaatgggggttgcctgcatactatcgtaatggggtcgatggttgattattgattagtatattccttattctttttattcacacaaaaagaacatttttataaacatgaaaccactgtctaaatgtaattatgatcttgatttatagatgaagatcagcctttagaggattttaaccagtatgtttaatatgaaaaaaataaacataacatattttgagattaagcgctattgtgcttaattattttgctctataaactgaatatatagccacaattattgacgggcttgtttatgaccggcaatcggatcccacgatgtgctagactctctcgtctacgcggccgcaactgagagaccaagcttgtcgactaaaatagtttaactcttttaaaaccagtttggtactggaatttcagttcattactcgttgagaaattgatgatttttttaaaatgatattacttttatatgcttgcatcgcagaatgatattcacaagtattattaaaaatgagtatcggtagttacattaccatatcatccatgctcatatggatctccatccattatataatcaatgatacatgtattaaaatactttccgaataagtcttttaaatattgtattaattatgaaaaactatgctatgcgagtatgatgcaaagatgtttaatgatacgatactagattttatctctagcgagagatgtcgttagaatcatttatcataactacgtttaataataattcatcaacgaatatcgataacatgtgtcatttatactttaaatacgttaaagtctgtccgtcttctctattgtttagactgtttgtagaatgctgtgatataaacaaactagtagaaggta

SEQ ID NO: 53 - DNA, 29903 bp, Severe acute respiratory syndrome coronavirus 2
attaaaggtttataccttcccaggtaacaaaccaaccaactttcgatctcttgtagatctgttctctaaacgaactttaaaatctgtgtggctgtcactcggctgcatgcttagtgcactcacgcagtataattaataactaattactgtcgttgacaggacacgagtaactcgtctatcttctgcaggctgcttacggtttcgtccgtgttgcagccgatcatcagcacatctaggtttcgtccgggtgtgaccgaaaggtaagatggagagccttgtccctggtttcaacgagaaaacacacgtccaactcagtttgcctgttttacaggttcgcgacgtgctcgtacgtggctttggagactccgtggaggaggtcttatcagaggcacgtcaacatcttaaagatggcacttgtggcttagtagaagttgaaaaaggcgttttgcctcaacttgaacagccctatgtgttcatcaaacgttcggatgctcgaactgcacctcatggtcatgttatggttgagctggtagcagaactcgaaggcattcagtacggtcgtagtggtgagacacttggtgtccttgtccctcatgtgggcgaaataccagtggcttaccgcaaggttcttcttcgtaagaacggtaataaaggagctggtggccatagttacggcgccgatctaaagtcatttgacttaggcgacgagcttggcactgatccttatgaagattttcaagaaaactggaacactaaacatagcagtggtgttacccgtgaactcatgcgtgagcttaacggaggggcatacactcgctatgtcgataacaacttctgtggccctgatggctaccctcttgagtgcattaaagaccttctagcacgtgctggtaaagcttcatgcactttgtccgaacaactggactttattgacactaagaggggtgtatactgctgccgtgaacatgagcatgaaattgcttggtacacggaacgttctgaaaagagctatgaattgcagacaccttttgaaattaaattggcaaagaaatttgacaccttcaatggggaatgtccaaattttgtatttcccttaaattccataatcaagactattcaaccaagggttgaaaagaaaaagcttgatggctttatgggtagaattcgatctgtctatccagttgcgtcaccaaatgaatgcaaccaaatgtgcctttcaactctcatgaagtgtgatcattgtggtgaaacttcatggcagacgggcgattttgttaaagccacttgcgaattttgtggcactgagaatttgactaaagaaggtgccactacttgtggttacttaccccaaaatgctgttgttaaaatttattgtccagcatgtcacaattcagaagtaggacctgagcatagtcttgccgaataccataatgaatctggcttgaaaaccattcttcgtaagggtggtcgcactattgcctttggaggctgtgtgttctcttatgttggttgccataacaagtgtgcctattgggttccacgtgctagcgctaacataggttgtaaccatacaggtgttgttggagaaggttccgaaggtcttaatgacaaccttcttgaaatactccaaaaagagaaagtcaacatcaatattgttggtgactttaaacttaatgaagagatcgccattattttggcatctttttctgcttccacaagtgcttttgtggaaactgtgaaaggtttggattataaagcattcaaacaaattgttgaatcctgtggtaattttaaagttacaaaaggaaaagctaaaaaaggtgcctggaatattggtgaacagaaatcaatactgagtcctctttatgcatttgcatcagaggctgctcgtgttgtacgatcaattttctcccgcactcttgaaactgctcaaaattctgtgcgtgttttacagaaggccgctataacaatactagatggaatttcacagtattcactgagactcattgatgctatgatgttcacatctgatttggctactaacaatctagttgtaatggcctacattacaggtggtgttgttcagttgacttcgcagtggctaactaacatctttggcactgtttatgaaaaactcaaacccgtccttgattggcttgaagagaagtttaaggaaggtgtagagtttcttagagacggttgggaaattgttaaatttatctcaacctgtgcttgtgaaattgtcggtggacaaattgtcacctgtgcaaaggaaattaaggagagtgttcagacattctttaagcttgtaaataaatttttggctttgtgtgctgactctatcattattggtggagctaaacttaaagccttgaatttaggtgaaacatttgtcacgcactcaaagggattgtacagaaagtgtgttaaatccagagaagaaactggcctactcatgcctctaaaagccccaaaagaaattatcttcttagagggagaaacacttcccacagaagtgttaacagaggaagttgtcttgaaaactggtgatttacaaccattagaacaacctactagtgaagctgttgaagctccattggttggtacaccagtttgtattaacgggcttatgttgctcgaaatcaaagacacagaaaagtactgtgcccttgcacctaatatgatggtaacaaacaataccttcacactcaaaggcggtgcaccaacaaaggttacttttggtgatgacactgtgatagaagtgcaaggttacaagagtgtgaatatcacttttgaacttgatgaaaggattgataaagtacttaatgagaagtgctctgcctatacagttgaactcggtacagaagtaaatgagttcgcctgtgttgtggcagatgctgtcataaaaactttgcaaccagtatctgaattacttacaccactgggcattgatttagatgagtggagtatggctacatactacttatttgatgagtctggtgagtttaaattggcttcacatatgtattgttctttctaccctccagatgaggatgaagaagaaggtgattgtgaagaagaagagtttgagccatcaactcaatatgagtatggtactgaagatgattaccaaggtaaacctttggaatttggtgccacttctgctgctcttcaacctgaagaagagcaagaagaagattggttagatgatgatagtcaacaaactgttggtcaacaagacggcagtgaggacaatcagacaactactattcaaacaattgttgaggttcaacctcaattagagatggaacttacaccagttgttcagactattgaagtgaatagttttagtggttatttaaaacttactgacaatgtatacattaaaaatgcagacattgtggaagaagctaaaaaggtaaaaccaacagtggttgttaatgcagccaatgtttaccttaaacatggaggaggtgttgcaggagccttaaataaggctactaacaatgccatgcaagttgaatctgatgattacatagctactaatggaccacttaaagtgggtggtagttgtgttttaagcggacacaatcttgctaaacactgtcttcatgttgtcggcccaaatgttaacaaaggtgaagacattcaacttcttaagagtgcttatgaaaattttaatcagcacgaagttctacttgcaccattattatcagctggtatttttggtgctgaccctatacattctttaagagtttgtgtagatactgttcgcacaaatgtctacttagctgtctttgataaaaatctctatgacaaacttgtttcaagctttttggaaatgaagagtgaaaagcaagttgaacaaaagatcgctgagattcctaaagaggaagttaagccatttataactgaaagtaaaccttcagttgaacagagaaaacaagatgataagaaaatcaaagcttgtgttgaagaagttacaacaactctggaagaaactaagttcctcacagaaaacttgttactttatattgacattaatggcaatcttcatccagattctgccactcttgttagtgacattgacatcactttcttaaagaaagatgctccatatatagtgggtgatgttgttcaagagggtgttttaactgctgtggttatacctactaaaaaggctggtggcactactgaaatgctagcgaaagctttgagaaaagtgccaacagacaattatataaccacttacccgggtcagggtttaaatggttacactgtagaggaggcaaagacagtgcttaaaaagtgtaaaagtgccttttacattctaccatctattatctctaatgagaagcaagaaattcttggaactgtttcttggaatttgcgagaaatgcttgcacatgcagaagaaacacgcaaattaatgcctgtctgtgtggaaactaaagccatagtttcaactatacagcgtaaatataagggtattaaaatacaagagggtgtggttgattatggtgctagattttacttttacaccagtaaaacaactgtagcgtcacttatcaacacacttaacgatctaaatgaaactcttgttacaatgccacttggctatgtaacacatggcttaaatttggaagaagctgctcggtatatgagatctctcaaagtgccagctacagtttctgtttcttcacctgatgctgttacagcgtataatggttatcttacttcttcttctaaaacacctgaagaacattttattgaaaccatctcacttgctggttcctataaagattggtcctattctggacaatctacacaactaggtatagaatttcttaagagaggtgataaaagtgtatattacactagtaatcctaccacattccacctagatggtgaagttatcacctttgacaatcttaagacacttctttctttgagagaagtgaggactattaaggtgtttacaacagtagacaacattaacctccacacgcaagttgtggacatgtcaatgacatatggacaacagtttggtccaacttatttggatggagctgatgttactaaaataaaacctcataattcacatgaaggtaaaacattttatgttttacctaatgatgacactctacgtgttgaggcttttgagtactaccacacaactgatcctagttttctgggtaggtacatgtcagcattaaatcacactaaaaagtggaaatacccacaagttaatggtttaacttctattaaatgggcagataacaactgttatcttgccactgcattgttaacactccaacaaatagagttgaagtttaatccacctgctctacaagatgcttattacagagcaagggctggtgaagctgctaacttttgtgcacttatcttagcctactgtaataagacagtaggtgagttaggtgatgttagagaaacaatgagttacttgtttcaacatgccaatttagattcttgcaaaagagtcttgaacgtggtgtgtaaaacttgtggacaacagcagacaacccttaagggtgtagaagctgttatgtacatgggcacactttcttatgaacaatttaagaaaggtgttcagataccttgtacgtgtggtaaacaagctacaaaatatctagtacaacaggagtcaccttttgttatgatgtcagcaccacctgctcagtatgaacttaagcatggtacatttacttgtgctagtgagtacactggtaattaccagtgtggtcactataaacatataacttctaaagaaactttgtattgcatagacggtgctttacttacaaagtcctcagaatacaaaggtcctattacggatgttttctacaaagaaaacagttacacaacaaccataaaaccagttacttataaattggatggtgttgtttgtacagaaattgaccctaagttggacaattattataagaaagacaattcttatttcacagagcaaccaattgatcttgtaccaaaccaaccatatccaaacgcaagcttcgataattttaagtttgtatgtgataatatcaaatttgctgatgatttaaaccagttaactggttataagaaacctgcttcaagagagcttaaagttacatttttccctgacttaaatggtgatgtggtggctattgattataaacactacacaccctcttttaagaaaggagctaaattgttacataaacctattgtttggcatgttaacaatgcaactaataaagccacgtataaaccaaatacctggtgtatacgttgtctttggagcacaaaaccagttgaaacatcaaattcgtttgatgtactgaagtcagaggacgcgcagggaatggataatcttgcctgcgaagatctaaaaccagtctctgaagaagtagtggaaaatcctaccatacagaaagacgttcttgagtgtaatgtgaaaactaccgaagttgtaggagacattatacttaaaccagcaaataatagtttaaaaattacagaagaggttggccacacagatctaatggctgcttatgtagacaattctagtcttactattaagaaacctaatgaattatctagagtattaggtttgaaaacccttgctactcatggtttagctgctgttaatagtgtcccttgggatactatagctaattatgctaagccttttcttaacaaagttgttagtacaactactaacatagttacacggtgtttaaaccgtgtttgtactaattatatgccttatttctttactttattgctacaattgtgtacttttactagaagtacaaattctagaattaaagcatctatgccgactactatagcaaagaatactgttaagagtgtcggtaaattttgtctagaggcttcatttaattatttgaagtcacctaatttttctaaactgataaatattataatttggtttttactattaagtgtttgcctaggttctttaatctactcaaccgctgctttaggtgttttaatgtctaatttaggcatgccttcttactgtactggttacagagaaggctatttgaactctactaatgtcactattgcaacctactgtactggttctataccttgtagtgtttgtcttagtggtttagattctttagacacctatccttctttagaaactatacaaattaccatttcatcttttaaatgggatttaactgcttttggcttagttgcagagtggtttttggcatatattcttttcactaggtttttctatgtacttggattggctgcaatcatgcaattgtttttcagctattttgcagtacattttattagtaattcttggcttatgtggttaataattaatcttgtacaaatggccccgatttcagctatggttagaatgtacatcttctttgcatcattttattatgtatggaaaagttatgtgcatgttgtagacggttgtaattcatcaacttgtatgatgtgttacaaacgtaatagagcaacaagagtcgaatgtacaactattgttaatggtgttagaaggtccttttatgtctatgctaatggaggtaaaggcttttgcaaactacacaattggaattgtgttaattgtgatacattctgtgctggtagtacatttattagtgatgaagttgcgagagacttgtcactacagtttaaaagaccaataaatcctactgaccagtcttcttacatcgttgatagtgttacagtgaagaatggttccatccatctttactttgataaagctggtcaaaagacttatgaaagacattctctctctcattttgttaacttagacaacctgagagctaataacactaaaggttcattgcctattaatgttatagtttttgatggtaaatcaaaatgtgaagaatcatctgcaaaatcagcgtctgtttactacagtcagcttatgtgtcaacctatactgttactagatcaggcattagtgtctgatgttggtgatagtgcggaagttgcagttaaaatgtttgatgcttacgttaatacgttttcatcaacttttaacgtaccaatggaaaaactcaaaacactagttgcaactgcagaagctgaacttgcaaagaatgtgtccttagacaatgtcttatctacttttatttcagcagctcggcaagggtttgttgattcagatgtagaaactaaagatgttgttgaatgtcttaaattgtcacatcaatctgacatagaagttactggcgatagttgtaataactatatgctcacctataacaaagttgaaaacatgacaccccgtgaccttggtgcttgtattgactgtagtgcgcgtcatattaatgcgcaggtagcaaaaagtcacaacattgctttgatatggaacgttaaagatttcatgtcattgtctgaacaactacgaaaacaaatacgtagtgctgctaaaaagaataacttaccttttaagttgacatgtgcaactactagacaagttgttaatgttgtaacaacaaagatagcacttaagggtggtaaaattgttaataattggttgaagcagttaattaaagttacacttgtgttcctttttgttgctgctattttctatttaataacacctgttcatgtcatgtctaaacatactgacttttcaagtgaaatcataggatacaaggctattgatggtggtgtcactcgtgacatagcatctacagatacttgttttgctaacaaacatgctgattttgacacatggtttagccagcgtggtggtagttatactaatgacaaagcttgcccattgattgctgcagtcataacaagagaagtgggttttgtcgtgcctggtttgcctggcacgatattacgcacaactaatggtgactttttgcatttcttacctagagtttttagtgcagttggtaacatctgttacacaccatcaaaacttatagagtacactgactttgcaacatcagcttgtgttttggctgctgaatgtacaatttttaaagatgcttctggtaagccagtaccatattgttatgataccaatgtactagaaggttctgttgcttatgaaagtttacgccctgacacacgttatgtgctcatggatggctctattattcaatttcctaacacctaccttgaaggttctgttagagtggtaacaacttttgattctgagtactgtaggcacggcacttgtgaaagatcagaagctggtgtttgtgtatctactagtggtagatgggtacttaacaatgattattacagatctttaccaggagttttctgtggtgtagatgctgtaaatttacttactaatatgtttacaccactaattcaacctattggtgctttggacatatcagcatctatagtagctggtggtattgtagctatcgtagtaacatgccttgcctactattttatgaggtttagaagagcttttggtgaatacagtcatgtagttgcctttaatactttactattccttatgtcattcactgtactctgtttaacaccagtttactcattcttacctggtgtttattctgttatttacttgtacttgacattttatcttactaatgatgtttcttttttagcacatattcagtggatggttatgttcacacctttagtacctttctggataacaattgcttatatcatttgtatttccacaaagcatttctattggttctttagtaattacctaaagagacgtgtagtctttaatggtgtttcctttagtacttttgaagaagctgcgctgtgcacctttttgttaaataaagaaatgtatctaaagttgcgtagtgatgtgctattacctcttacgcaatataatagatacttagctctttataataagtacaagtattttagtggagcaatggatacaactagctacagagaagctgcttgttgtcatctcgcaaaggctctcaatgacttcagtaactcaggttctgatgttctttaccaaccaccacaaacctctatcacctcagctgttttgcagagtggttttagaaaaatggcattcccatctggtaaagttgagggttgtatggtacaagtaacttgtggtacaactacacttaacggtctttggcttgatgacgtagtttactgtccaagacatgtgatctgcacctctgaagacatgcttaaccctaattatgaagatttactcattcgtaagtctaatcataatttcttggtacaggctggtaatgttcaactcagggttattggacattctatgcaaaattgtgtacttaagcttaaggttgatacagccaatcctaagacacctaagtataagtttgttcgcattcaaccaggacagactttttcagtgttagcttgttacaatggttcaccatctggtgtttaccaatgtgctatgaggcccaatttcactattaagggttcattccttaatggttcatgtggtagtgttggttttaacatagattatgactgtgtctctttttgttacatgcaccatatggaattaccaactggagttcatgctggcacagacttagaaggtaacttttatggaccttttgttgacaggcaaacagcacaagcagctggtacggacacaactattacagttaatgttttagcttggttgtacgctgctgttataaatggagacaggtggtttctcaatcgatttaccacaactcttaatgactttaaccttgtggctatgaagtacaattatgaacctctaacacaagaccatgttgacatactaggacctctttctgctcaaactggaattgccgttttagatatgtgtgcttcattaaaagaattactgcaaaatggtatgaatggacgtaccatattgggtagtgctttattagaagatgaatttacaccttttgatgttgttagacaatgctcaggtgttactttccaaagtgcagtgaaaagaacaatcaagggtacacaccactggttgttactcacaattttgacttcacttttagttttagtccagagtactcaatggtctttgttcttttttttgtatgaaaatgcctttttaccttttgctatgggtattattgctatgtctgcttttgcaatgatgtttgtcaaacataagcatgcatttctctgtttgtttttgttaccttctcttgccactgtagcttattttaatatggtctatatgcctgctagttgggtgatgcgtattatgacatggttggatatggttgatactagtttgtctggttttaagctaaaagactgtgttatgtatgcatcagctgtagtgttactaatccttatgacagcaagaactgtgtatgatgatggtgctaggagagtgtggacacttatgaatgtcttgacactcgtttataaagtttattatggtaatgctttagatcaagccatttccatgtgggctcttataatctctgttacttctaactactcaggtgtagttacaactgtcatgtttttggccagaggtattgtttttatgtgtgttgagtattgccctattttcttcataactggtaatacacttcagtgtataatgctagtttattgtttcttaggctatttttgtacttgttactttggcctcttttgtttactcaaccgctactttagactgactcttggtgtttatgattacttagtttctacacaggagtttagatatatgaattcacagggactactcccacccaagaatagcatagatgccttcaaactcaacattaaattgttgggtgttggtggcaaaccttgtatcaaagtagccactgtacagtctaaaatgtcagatgtaaagtgcacatcagtagtcttactctcagttttgcaacaactcagagtagaatcatcatctaaattgtgggctcaatgtgtccagttacacaatgacattctcttagctaaagatactactgaagcctttgaaaaaatggtttcactactttctgttttgctttccatgcagggtgctgtagacataaacaagctttgtgaagaaatgctggacaacagggcaaccttacaagctatagcctcagagtttagttcccttccatcatatgcagcttttgctactgctcaagaagcttatgagcaggctgttgctaatggtgattctgaagttgttcttaaaaagttgaagaagtctttgaatgtggctaaatctgaatttgaccgtgatgcagccatgcaacgtaagttggaaaagatggctgatcaagctatgacccaaatgtataaacaggctagatctgaggacaagagggcaaaagttactagtgctatgcagacaatgcttttcactatgcttagaaagttggataatgatgcactcaacaacattatcaacaatgcaagagatggttgtgttcccttgaacataatacctcttacaacagcagccaaactaatggttgtcataccagactataacacatataaaaatacgtgtgatggtacaacatttacttatgcatcagcattgtgggaaatccaacaggttgtagatgcagatagtaaaattgttcaacttagtgaaattagtatggacaattcacctaatttagcatggcctcttattgtaacagctttaagggccaattctgctgtcaaattacagaataatgagcttagtcctgttgcactacgacagatgtcttgtgctgccggtactacacaaactgcttgcactgatgacaatgcgttagcttactacaacacaacaaagggaggtaggtttgtacttgcactgttatccgatttacaggatttgaaatgggctagattccctaagagtgatggaactggtactatctatacagaactggaaccaccttgtaggtttgttacagacacacctaaaggtcctaaagtgaagtatttatactttattaaaggattaaacaacctaaatagaggtatggtacttggtagtttagctgccacagtacgtctacaagctggtaatgcaacagaagtgcctgccaattcaactgtattatctttctgtgcttttgctgtagatgctgctaaagcttacaaagattatctagctagtgggggacaaccaatcactaattgtgttaagatgttgtgtacacacactggtactggtcaggcaataacagttacaccggaagccaatatggatcaagaatcctttggtggtgcatcgtgttgtctgtactgccgttgccacatagatcatccaaatcctaaaggattttgtgacttaaaaggtaagtatgtacaaatacctacaacttgtgctaatgaccctgtgggttttacacttaaaaacacagtctgtaccgtctgcggtatgtggaaaggttatggctgtagttgtgatcaactccgcgaacccatgcttcagtcagctgatgcacaatcgtttttaaacgggtttgcggtgtaagtgcagcccgtcttacaccgtgcggcacaggcactagtactgatgtcgtatacagggcttttgacatctacaatgataaagtagctggttttgctaaattcctaaaaactaattgttgtcgcttccaagaaaaggacgaagatgacaatttaattgattcttactttgtagttaagagacacactttctctaactaccaacatgaagaaacaatttataatttacttaaggattgtccagctgttgctaaacatgacttctttaagtttagaatagacggtgacatggtaccacatatatcacgtcaacgtcttactaaatacacaatggcagacctcgtctatgctttaaggcattttgatgaaggtaattgtgacacattaaaagaaatacttgtcacatacaattgttgtgatgatgattatttcaataaaaaggactggtatgattttgtagaaaacccagatatattacgcgtatacgccaacttaggtgaacgtgtacgccaagctttgttaaaaacagtacaattctgtgatgccatgcgaaatgctggtattgttggtgtactgacattagataatcaagatctcaatggtaactggtatgatttcggtgatttcatacaaaccacgccaggtagtggagttcctgttgtagattcttattattcattgttaatgcctatattaaccttgaccagggctttaactgcagagtcacatgttgacactgacttaacaaagccttacattaagtgggatttgttaaaatatgacttcacggaagagaggttaaaactctttgaccgttattttaaatattgggatcagacataccacccaaattgtgttaactgtttggatgacagatgcattctgcattgtgcaaactttaatgttttattctctacagtgttcccacctacaagttttggaccactagtgagaaaaatatttgttgatggtgttccatttgtagtttcaactggataccacttcagagagctaggtgttgtacataatcaggatgtaaacttacatagctctagacttagttttaaggaattacttgtgtatgctgctgaccctgctatgcacgctgcttctggtaatctattactagataaacgcactacgtgcttttcagtagctgcacttactaacaatgttgcttttcaaactgtcaaacccggtaattttaacaaagacttctatgactttgctgtgtctaagggtttctttaaggaaggaagttctgttgaattaaaacacttcttctttgctcaggatggtaatgctgctatcagcgattatgactactatcgttataatctaccaacaatgtgtgatatcagacaactactatttgtagttgaagttgttgataagtactttgattgttacgatggtggctgtattaatgctaaccaagtcatcgtcaacaacctagacaaatcagctggttttccatttaataaatggggtaaggctagactttattatgattcaatgagttatgaggatcaagatgcacttttcgcatatacaaaacgtaatgtcatccctactataactcaaatgaatcttaagtatgccattagtgcaaagaatagagctcgcaccgtagctggtgtctctatctgtagtactatgaccaatagacagtttcatcaaaaattattgaaatcaatagccgccactagaggagctactgtagtaattggaacaagcaaattctatggtggttggcacaacatgttaaaaactgtttatagtgatgtagaaaaccctcaccttatgggttgggattatcctaaatgtgatagagccatgcctaacatgcttagaattatggcctcacttgttcttgctcgcaaacatacaacgtgttgtagcttgtcacaccgtttctatagattagctaatgagtgtgctcaagtattgagtgaaatggtcatgtgtggcggttcactatatgttaaaccaggtggaacctcatcaggagatgccacaactgcttatgctaatagtgtttttaacatttgtcaagctgtcacggccaatgttaatgcacttttatctactgatggtaacaaaattgccgataagtatgtccgcaatttacaacacagactttatgagtgtctctatagaaatagagatgttgacacagactttgtgaatgagttttacgcatatttgcgtaaacatttctcaatgatgatactctctgacgatgctgttgtgtgtttcaatagcacttatgcatctcaaggtctagtggctagcataaagaactttaagtcagttctttattatcaaaacaatgtttttatgtctgaagcaaaatgttggactgagactgaccttactaaaggacctcatgaattttgctctcaacatacaatgctagttaaacagggtgatgattatgtgtaccttccttacccagatccatcaagaatcctaggggccggctgttttgtagatgatatcgtaaaaacagatggtacacttatgattgaacggttcgtgtctttagctatagatgcttacccacttactaaacatcctaatcaggagtatgctgatgtctttcatttgtacttacaatacataagaaagctacatgatgagttaacaggacacatgttagacatgtattctgttatgcttactaatgataacacttcaaggtattgggaacctgagttttatgaggctatgtacacaccgcatacagtcttacaggctgttggggcttgtgttctttgcaattcacagacttcattaagatgtggtgcttgcatacgtagaccattcttatgttgtaaatgctgttacgaccatgtcatatcaacatcacataaattagtcttgtctgttaatccgtatgtttgcaatgctccaggttgtgatgtcacagatgtgactcaactttacttaggaggtatgagctattattgtaaatcacataaaccacccattagttttccattgtgtgctaatggacaagtttttggtttatataaaaatacatgtgttggtagcgataatgttactgactttaatgcaattgcaacatgtgactggacaaatgctggtgattacattttagctaacacctgtactgaaagactcaagctttttgcagcagaaacgctcaaagctactgaggagacatttaaactgtcttatggtattgctactgtacgtgaagtgctgtctgacagagaattacatctttcatgggaagttggtaaacctagaccaccacttaaccgaaattatgtctttactggttatcgtgtaactaaaaacagtaaagtacaaataggagagtacacctttgaaaaaggtgactatggtgatgctgttgtttaccgaggtacaacaacttacaaattaaatgttggtgattattttgtgctgacatcacatacagtaatgccattaagtgcacctacactagtgccacaagagcactatgttagaattactggcttatacccaacactcaatatctcagatgagttttctagcaatgttgcaaattatcaaaaggttggtatgcaaaagtattctacactccagggaccacctggtactggtaagagtcattttgctattggcctagctctctactacccttctgctcgcatagtgtatacagcttgctctcatgccgctgttgatgcactatgtgagaaggcattaaaatatttgcctatagataaatgtagtagaattatacctgcacgtgctcgtgtagagtgttttgataaattcaaagtgaattcaacattagaacagtatgtcttttgtactgtaaatgcattgcctgagacgacagcagatatagttgtctttgatgaaatttcaatggccacaaattatgatttgagtgttgtcaatgccagattacgtgctaagcactatgtgtacattggcgaccctgctcaattacctgcaccacgcacattgctaactaagggcacactagaaccagaatatttcaattcagtgtgtagacttatgaaaactataggtccagacatgttcctcggaacttgtcggcgttgtcctgctgaaattgttgacactgtgagtgctttggtttatgataataagcttaaagcacataaagacaaatcagctcaatgctttaaaatgttttataagggtgttatcacgcatgatgtttcatctgcaattaacaggccacaaataggcgtggtaagagaattccttacacgtaaccctgcttggagaaaagctgtctttatttcaccttataattcacagaatgctgtagcctcaaagattttgggactaccaactcaaactgttgattcatcacagggctcagaatatgactatgtcatattcactcaaaccactgaaacagctcactcttgtaatgtaaacagatttaatgttgctattaccagagcaaaagtaggcatactttgcataatgtctgatagagacctttatgacaagttgcaatttacaagtcttgaaattccacgtaggaatgtggcaactttacaagctgaaaatgtaacaggactctttaaagattgtagtaaggtaatcactgggttacatcctacacaggcacctacacacctcagtgttgacactaaattcaaaactgaaggtttatgtgttgacatacctggcatacctaaggacatgacctatagaagactcatctctatgatgggttttaaaatgaattatcaagttaatggttaccctaacatgtttatcacccgcgaagaagctataagacatgtacgtgcatggattggcttcgatgtcgaggggtgtcatgctactagagaagctgttggtaccaatttacctttacagctaggtttttctacaggtgttaacctagttgctgtacctacaggttatgttgatacacctaataatacagatttttccagagttagtgctaaaccaccgcctggagatcaatttaaacacctcataccacttatgtacaaaggacttccttggaatgtagtgcgtataaagattgtacaaatgttaagtgacacacttaaaaatctctctgacagagtcgtatttgtcttatgggcacatggctttgagttgacatctatgaagtattttgtgaaaataggacctgagcgcacctgttgtctatgtgatagacgtgccacatgcttttccactgcttcagacacttatgcctgttggcatcattctattggatttgattacgtctataatccgtttatgattgatgttcaacaatggggttttacaggtaacctacaaagcaaccatgatctgtattgtcaagtccatggtaatgcacatgtagctagttgtgatgcaatcatgactaggtgtctagctgtccacgagtgctttgttaagcgtgttgactggactattgaatatcctataattggtgatgaactgaagattaatgcggcttgtagaaaggttcaacacatggttgttaaagctgcattattagcagacaaattcccagttcttcacgacattggtaaccctaaagctattaagtgtgtacctcaagctgatgtagaatggaagttctatgatgcacagccttgtagtgacaaagcttataaaatagaagaattattctattcttatgccacacattctgacaaattcacagatggtgtatgcctattttggaattgcaatgtcgatagatatcctgctaattccattgtttgtagatttgacactagagtgctatctaaccttaacttgcctggttgtgatggtggcagtttgtatgtaaataaacatgcattccacacaccagcttttgataaaagtgcttttgttaatttaaaacaattaccatttttctattactctgacagtccatgtgagtctcatggaaaacaagtagtgtcagatatagattatgtaccactaaagtctgctacgtgtataacacgttgcaatttaggtggtgctgtctgtagacatcatgctaatgagtacagattgtatctcgatgcttataacatgatgatctcagctggctttagcttgtgggtttacaaacaatttgatacttataacctctggaacacttttacaagacttcagagtttagaaaatgtggcttttaatgttgtaaataagggacactttgatggacaacagggtgaagtaccagtttctatcattaataacactgtttacacaaaagttgatggtgttgatgtagaattgtttgaaaataaaacaacattacctgttaatgtagcatttgagctttgggctaagcgcaacattaaaccagtaccagaggtgaaaatactcaataatttgggtgtggacattgctgctaatactgtgatctgggactacaaaagagatgctccagcacatatatctactattggtgtttgttctatgactgacatagccaagaaaccaactgaaacgatttgtgcaccactcactgtcttttttgatggtagagttgatggtcaagtagacttatttagaaatgcccgtaatggtgttcttattacagaaggtagtgttaaaggtttacaaccatctgtaggtcccaaacaagctagtcttaatggagtcacattaattggagaagccgtaaaaacacagttcaattattataagaaagttgatggtgttgtccaacaattacctgaaacttactttactcagagtagaaatttacaagaatttaaacccaggagtcaaatggaaattgatttcttagaattagctatggatgaattcattgaacggtataaattagaaggctatgccttcgaacatatcgtttatggagattttagtcatagtcagttaggtggtttacatctactgattggactagctaaacgttttaaggaatcaccttttgaattagaagattttattcctatggacagtacagttaaaaactatttcataacagatgcgcaaacaggttcatctaagtgtgtgtgttctgttattgatttattacttgatgattttgttgaaataataaaatcccaagatttatctgtagtttctaaggttgtcaaagtgactattgactatacagaaatttcatttatgctttggtgtaaagatggccatgtagaaacattttacccaaaattacaatctagtcaagcgtggcaaccgggtgttgctatgcctaatctttacaaaatgcaaagaatgctattagaaaagtgtgaccttcaaaattatggtgatagtgcaacattacctaaaggcataatgatgaatgtcgcaaaatatactcaactgtgtcaatatttaaacacattaacattagctgtaccctataatatgagagttatacattttggtgctggttctgataaaggagttgcaccaggtacagctgttttaagacagtggttgcctacgggtacgctgcttgtcgattcagatcttaatgactttgtctctgatgcagattcaactttgattggtgattgtgcaactgtacatacagctaataaatgggatctcattattagtgatatgtacgaccctaagactaaaaatgttacaaaagaaaatgactctaaagagggttttttcacttacatttgtgggtttatacaacaaaagctagctcttggaggttccgtggctataaagataacagaacattcttggaatgctgatctttataagctcatgggacacttcgcatggtggacagcctttgttactaatgtgaatgcgtcatcatctgaagcatttttaattggatgtaattatcttggcaaaccacgcgaacaaatagatggttatgtcatgcatgcaaattacatattttggaggaatacaaatccaattcagttgtcttcctattctttatttgacatgagtaaatttccccttaaattaaggggtactgctgttatgtctttaaaagaaggtcaaatcaatgatatgattttatctcttcttagtaaaggtagacttataattagagaaaacaacagagttgttatttctagtgatgttcttgttaacaactaaacgaacaatgtttgtttttcttgttttattgccactagtctctagtcagtgtgttaatcttacaaccagaactcaattaccccctgcatacactaattctttcacacgtggtgtttattaccctgacaaagttttcagatcctcagttttacattcaactcaggacttgttcttacctttcttttccaatgttacttggttccatgctatacatgtctctgggaccaatggtactaagaggtttgataaccctgtcctaccatttaatgatggtgtttattttgcttccactgagaagtctaacataataagaggctggatttttggtactactttagattcgaagacccagtccctacttattgttaataacgctactaatgttgttattaaagtctgtgaatttcaattttgtaatgatccatttttgggtgtttattaccacaaaaacaacaaaagttggatggaaagtgagttcagagtttattctagtgcgaataattgcacttttgaatatgtctctcagccttttcttatggaccttgaaggaaaacagggtaatttcaaaaatcttagggaatttgtgtttaagaatattgatggttattttaaaatatattctaagcacacgcctattaatttagtgcgtgatctccctcagggtttttcggctttagaaccattggtagatttgccaataggtattaacatcactaggtttcaaactttacttgctttacatagaagttatttgactcctggtgattcttcttcaggttggacagctggtgctgcagcttattatgtgggttatcttcaacctaggacttttctattaaaatataatgaaaatggaaccattacagatgctgtagactgtgcacttgaccctctctcagaaacaaagtgtacgttgaaatccttcactgtagaaaaaggaatctatcaaacttctaactttagagtccaaccaacagaatctattgttagatttcctaatattacaaacttgtgcccttttggtgaagtttttaacgccaccagatttgcatctgtttatgcttggaacaggaagagaatcagcaactgtgttgctgattattctgtcctatataattccgcatcattttccacttttaagtgttatggagtgtctcctactaaattaaatgatctctgctttactaatgtctatgcagattcatttgtaattagaggtgatgaagtcagacaaatcgctccagggcaaactggaaagattgctgattataattataaattaccagatgattttacaggctgcgttatagcttggaattctaacaatcttgattctaaggttggtggtaattataattacctgtatagattgtttaggaagtctaatctcaaaccttttgagagagatatttcaactgaaatctatcaggccggtagcacaccttgtaatggtgttgaaggttttaattgttactttcctttacaatcatatggtttccaacccactaatggtgttggttaccaaccatacagagtagtagtactttcttttgaacttctacatgcaccagcaactgtttgtggacctaaaaagtctactaatttggttaaaaacaaatgtgtcaatttcaacttcaatggtttaacaggcacaggtgttcttactgagtctaacaaaaagtttctgcctttccaacaatttggcagagacattgctgacactactgatgctgtccgtgatccacagacacttgagattcttgacattacaccatgttcttttggtggtgtcagtgttataacaccaggaacaaatacttctaaccaggttgctgttctttatcaggatgttaactgcacagaagtccctgttgctattcatgcagatcaacttactcctacttggcgtgtttattctacaggttctaatgtttttcaaacacgtgcaggctgtttaataggggctgaacatgtcaacaactcatatgagtgtgacatacccattggtgcaggtatatgcgctagttatcagactcagactaattctcctcggcgggcacgtagtgtagctagtcaatccatcattgcctacactatgtcacttggtgcagaaaattcagttgcttactctaataactctattgccatacccacaaattttactattagtgttaccacagaaattctaccagtgtctatgaccaagacatcagtagattgtacaatgtacatttgtggtgattcaactgaatgcagcaatcttttgttgcaatatggcagtttttgtacacaattaaaccgtgctttaactggaatagctgttgaacaagacaaaaacacccaagaagtttttgcacaagtcaaacaaatttacaaaacaccaccaattaaagattttggtggttttaatttttcacaaatattaccagatccatcaaaaccaagcaagaggtcatttattgaagatctacttttcaacaaagtgacacttgcagatgctggcttcatcaaacaatatggtgattgccttggtgatattgctgctagagacctcatttgtgcacaaaagtttaacggccttactgttttgccacctttgctcacagatgaaatgattgctcaatacacttctgcactgttagcgggtacaatcacttctggttggacctttggtgcaggtgctgcattacaaataccatttgctatgcaaatggcttataggtttaatggtattggagttacacagaatgttctctatgagaaccaaaaattgattgccaaccaatttaatagtgctattggcaaaattcaagactcactttcttccacagcaagtgcacttggaaaacttcaagatgtggtcaaccaaaatgcacaagctttaaacacgcttgttaaacaacttagctccaattttggtgcaatttcaagtgttttaaatgatatcctttcacgtcttgacaaagttgaggctgaagtgcaaattgataggttgatcacaggcagacttcaaagtttgcagacatatgtgactcaacaattaattagagctgcagaaatcagagcttctgctaatcttgctgctactaaaatgtcagagtgtgtacttggacaatcaaaaagagttgatttttgtggaaagggctatcatcttatgtccttccctcagtcagcacctcatggtgtagtcttcttgcatgtgacttatgtccctgcacaagaaaagaacttcacaactgctcctgccatttgtcatgatggaaaagcacactttcctcgtgaaggtgtctttgtttcaaatggcacacactggtttgtaacacaaaggaatttttatgaaccacaaatcattactacagacaacacatttgtgtctggtaactgtgatgttgtaataggaattgtcaacaacacagtttatgatcctttgcaacctgaattagactcattcaaggaggagttagataaatattttaagaatcatacatcaccagatgttgatttaggtgacatctctggcattaatgcttcagttgtaaacattcaaaaagaaattgaccgcctcaatgaggttgccaagaatttaaatgaatctctcatcgatctccaagaacttggaaagtatgagcagtatataaaatggccatggtacatttggctaggttttatagctggcttgattgccatagtaatggtgacaattatgctttgctgtatgaccagttgctgtagttgtctcaagggctgttgttcttgtggatcctgctgcaaatttgatgaagacgactctgagccagtgctcaaaggagtcaaattacattacacataaacgaacttatggatttgtttatgagaatcttcacaattggaactgtaactttgaagcaaggtgaaatcaaggatgctactccttcagattttgttcgcgctactgcaacgataccgatacaagcctcactccctttcggatggcttattgttggcgttgcacttcttgctgtttttcagagcgcttccaaaatcataaccctcaaaaagagatggcaactagcactctccaagggtgttcactttgtttgcaacttgctgttgttgtttgtaacagtttactcacaccttttgctcgttgctgctggccttgaagccccttttctctatctttatgctttagtctacttcttgcagagtataaactttgtaagaataataatgaggctttggctttgctggaaatgccgttccaaaaacccattactttatgatgccaactattttctttgctggcatactaattgttacgactattgtataccttacaatagtgtaacttcttcaattgtcattacttcaggtgatggcacaacaagtcctatttctgaacatgactaccagattggtggttatactgaaaaatgggaatctggagtaaaagactgtgttgtattacacagttacttcacttcagactattaccagctgtactcaactcaattgagtacagacactggtgttgaacatgttaccttcttcatctacaataaaattgttgatgagcctgaagaacatgtccaaattcacacaatcgacggttcatccggagttgttaatccagtaatggaaccaatttatgatgaaccgacgacgactactagcgtgcctttgtaagcacaagctgatgagtacgaacttatgtactcattcgtttcggaagagacaggtacgttaatagttaatagcgtacttctttttcttgctttcgtggtattcttgctagttacactagccatccttactgcgcttcgattgtgtgcgtactgctgcaatattgttaacgtgagtcttgtaaaaccttctttttacgtttactctcgtgttaaaaatctgaattcttctagagttcctgatcttctggtctaaacgaactaaatattatattagtttttctgtttggaactttaattttagccatggcagattccaacggtactattaccgttgaagagcttaaaaagctccttgaacaatggaacctagtaataggtttcctattccttacatggatttgtcttctacaatttgcctatgccaacaggaataggtttttgtatataattaagttaattttcctctggctgttatggccagtaactttagcttgttttgtgcttgctgctgtttacagaataaattggatcaccggtggaattgctatcgcaatggcttgtcttgtaggcttgatgtggctcagctacttcattgcttctttcagactgtttgcgcgtacgcgttccatgtggtcattcaatccagaaactaacattcttctcaacgtgccactccatggcactattctgaccagaccgcttctagaaagtgaactcgtaatcggagctgtgatccttcgtggacatcttcgtattgctggacaccatctaggacgctgtgacatcaaggacctgcctaaagaaatcactgttgctacatcacgaacgctttcttattacaaattgggagcttcgcagcgtgtagcaggtgactcaggttttgctgcatacagtcgctacaggattggcaactataaattaaacacagaccattccagtagcagtgacaatattgctttgcttgtacagtaagtgacaacagatgtttcatctcgttgactttcaggttactatagcagagatattactaattattatgaggacttttaaagtttccatttggaatcttgattacatcataaacctcataattaaaaatttatctaagtcactaactgagaataaatattctcaattagatgaagagcaaccaatggagattgattaaacgaacatgaaaattattcttttcttggcactgataacactcgctacttgtgagctttatcactaccaagagtgtgttagaggtacaacagtacttttaaaagaaccttgctcttctggaacatacgagggcaattcaccatttcatcctctagctgataacaaatttgcactgacttgctttagcactcaatttgcttttgcttgtcctgacggcgtaaaacacgtctatcagttacgtgccagatcagtttcacctaaactgttcatcagacaagaggaagttcaagaactttactctccaatttttcttattgttgcggcaatagtgtttataacactttgcttcacactcaaaagaaagacagaatgattgaactttcattaattgacttctatttgtgctttttagcctttctgctattccttgttttaattatgcttattatcttttggttctcacttgaactgcaagatcataatgaaacttgtcacgcctaaacgaacatgaaatttcttgttttcttaggaatcatcacaactgtagctgcatttcaccaagaatgtagtttacagtcatgtactcaacatcaaccatatgtagttgatgacccgtgtcctattcacttctattctaaatggtatattagagtaggagctagaaaatcagcacctttaattgaattgtgcgtggatgaggctggttctaaatcacccattcagtacatcgatatcggtaattatacagtttcctgtttaccttttacaattaattgccaggaacctaaattgggtagtcttgtagtgcgttgttcgttctatgaagactttttagagtatcatgacgttcgtgttgttttagatttcatctaaacgaacaaactaaaatgtctgataatggaccccaaaatcagcgaaatgcaccccgcattacgtttggtggaccctcagattcaactggcagtaaccagaatggagaacgcagtggggcgcgatcaaaacaacgtcggccccaaggtttacccaataatactgcgtcttggttcaccgctctcactcaacatggcaaggaagaccttaaattccctcgaggacaaggcgttccaattaacaccaatagcagtccagatgaccaaattggctactaccgaagagctaccagacgaattcgtggtggtgacggtaaaatgaaagatctcagtccaagatggtatttctactacctaggaactgggccagaagctggacttccctatggtgctaacaaagacggcatcatatgggttgcaactgagggagccttgaatacaccaaaagatcacattggcacccgcaatcctgctaacaatgctgcaatcgtgctacaacttcctcaaggaacaacattgccaaaaggcttctacgcagaagggagcagaggcggcagtcaagcctcttctcgttcctcatcacgtagtcgcaacagttcaagaaattcaactccaggcagcagtaggggaacttctcctgctagaatggctggcaatggcggtgatgctgctcttgctttgctgctgcttgacagattgaaccagcttgagagcaaaatgtctggtaaaggccaacaacaacaaggccaaactgtcactaagaaatctgctgctgaggcttctaagaagcctcggcaaaaacgtactgccactaaagcatacaatgtaacacaagctttcggcagacgtggtccagaacaaacccaaggaaattttggggaccaggaactaatcagacaaggaactgattacaaacattggccgcaaattgcacaatttgcccccagcgcttcagcgttcttcggaatgtcgcgcattggcatggaagtcacaccttcgggaacgtggttgacctacacaggtgccatcaaattggatgacaaagatccaaatttcaaagatcaagtcattttgctgaataagcatattgacgcatacaaaacattcccaccaacagagcctaaaaaggacaaaaagaagaaggctgatgaaactcaagccttaccgcagagacagaagaaacagcaaactgtgactcttcttcctgctgcagatttggatgatttctccaaacaattgcaacaatccatgagcagtgctgactcaactcaggcctaaactcatgcagaccacacaaggcagatgggctatataaacgttttcgcttttccgtttacgatatatagtctactcttgtgcagaatgaattctcgtaactacatagcacaagtagatgtagttaactttaatctcacatagcaatctttaatcagtgtgtaacattagggaggacttgaaagagccaccacattttcaccgaggccacgcggagtacgatcgagtgtacagtgaacaatgctagggagagctgcctatatggaagagccctaatgtgtaaaattaattttagtagtgctatccccatgtgattttaatagcttcttaggagaatgacaaaaaaaaaaaaaaaaaaaaaaaaaaaaaaaaa

SEQ ID NO: 54 - DNA, 4739 bp, Artificial Sequence
  Description of Artificial Sequence: Synthetic polynucleotide
ttggctagtcaagatgatgaatcttcattatctgatatattgcaaatcactcaatatctagactttctgttattattattgatccaatcaaaaaataaattagaagccgtgggtcattgttatgaatctctttcagaggaatacagacaattgacaaaattcacagactttcaagattttaaaaaactgtttaacaaggtccctattgttacagatggaagggtcaaacttaataaaggatatttgttcgactttgtgattagtttgatgcgattcaaaaaagaatcctctctagctaccaccgcaatagatcctattagatacatagatcctcgtcgtgatatcgcattttctaacgtgatggatatattaaagttgaataaagtgaacaataattaattctttattgtcatcggatcccacgatgtgctagactctctcgtctacgcggccgcaaaaattgaaattttattttttttttttggaatataaataatgttcgtgttcctagtcctactaccgctagtctcttcccagtgtgtaaacctaacaacgagaacacaactaccaccggcgtacaccaattctttcacaagaggagtatattacccggacaaggtgttcagatcctccgtactacattctacccaggacctattcctaccgttcttctctaacgtaacatggttccacgcgatccatgtctctggaacaaacggaacgaagagattcgataacccggtcttgccgttcaacgatggtgtatactttgcgtccaccgagaagtccaacatcatcagaggatggatcttcggaaccaccttggattctaagacccagtccttgctaatcgtcaacaacgcgaccaacgtcgtcatcaaagtctgcgaattccagttctgtaacgacccgtttttgggagtctactaccacaagaacaacaagtcctggatggaatccgagttcagagtctactcttccgcgaacaactgcaccttcgaatatgtatctcagccgttcctaatggacctagagggaaagcagggaaacttcaagaacctaagagagttcgtattcaagaacatcgacggatacttcaagatctactccaagcacaccccgatcaacctagttagagatctaccgcaaggattctctgcgctagaaccgttagtagatttgccgatcggaatcaacatcaccagattccagacactactagcgctacacagatcttacctaacgccgggagattcttcttctggatggactgctggtgctgcggcttattatgtaggatacctacagccgagaaccttcctattgaagtacaacgaaaacggaaccatcaccgatgccgtagattgtgctctagatccgctatccgaaacgaagtgcaccctaaagtctttcaccgtcgagaagggaatctaccagacctccaactttagagtacagccgaccgaatccatcgtcagatttccgaacatcacgaacctatgtccgttcggagaagtgttcaacgcgacaagatttgcgtctgtctatgcgtggaacagaaaaagaatcagtaactgcgtcgcggactactccgtcctatacaactctgcctctttctccacgttcaaatgctacggtgtatccccgacaaagctaaacgatctatgcttcaccaacgtctacgcggactccttcgtaatcagaggagatgaagttagacagattgcgccgggacaaactggaaagatcgcggattataactacaagctaccggacgacttcaccggatgtgtaattgcgtggaattcgaacaacctagactccaaagtcggaggaaactacaactacttgtacagactattcagaaagtccaacctaaagccgttcgagagagacatctccaccgaaatctatcaggctggatctacaccgtgtaatggtgtcgaaggattcaactgctacttcccgctacagtcttacggatttcaaccgacaaacggtgtaggatatcagccgtacagagtcgtcgtactatccttcgaactactacatgctccggcgacagtatgtggaccgaaaaagtctaccaacctagtcaagaacaaatgcgtcaactttaacttcaacggactaaccggaaccggtgtcctaaccgaatctaacaagaagtttctaccgttccagcagttcggaagagatatcgcggatacaacagacgctgtcagagatccgcaaaccttggagatcctagatatcaccccgtgttctttcggtggtgtctctgtaattactccgggaacgaacacctccaatcaagtagcggtactataccaggacgtgaactgtacagaagtaccggtagctattcacgcggatcaactaacaccaacttggagagtgtactccaccggatctaacgtattccaaacaagagcgggatgtctaatcggagcggaacacgtaaacaactcctacgaatgtgatatcccgattggagcgggaatctgtgcgtcttaccaaacacaaacaaactccccgagaagagcgagatctgtagcctctcaatctattatcgcctacaccatgtccttgggagccgaaaattctgtcgcgtactccaacaattctatcgcgatcccgacaaacttcaccatctctgtaacaaccgagatcctaccggtgtctatgaccaagacatctgtcgattgcaccatgtacatctgcggagattccaccgagtgctccaacctactactacagtacggatctttctgtacccagctaaacagagcgttgactggaatcgctgtagagcaggataagaacacccaagaggtattcgcgcaagtcaagcagatctataagactccgccgatcaaggacttcggaggttttaacttctctcagatcttgccggatccgtccaaaccgtctaagagatctttcatcgaggacctactattcaacaaagtcaccctagctgacgcgggattcatcaaacaatacggagattgcttgggagacattgcggcgagagatctaatttgcgcgcagaagtttaacggattgacagtactaccgccgctactaaccgatgagatgattgcgcagtacacgtctgctctattggcgggaacaattacaagtggatggacatttggagccggtgccgctctacaaattccgtttgctatgcaaatggcgtacagattcaacggaatcggagtaacccagaacgtcttgtacgagaaccagaagctaatcgcgaaccagttcaattccgcgatcggaaagatccaggacagtctatcttctactgcttcggcgttgggaaagctacaggatgtagtaaatcaaaacgcgcaggcgctaaacaccttggtcaagcaactatcctctaacttcggagcgatctcgtccgtcctaaacgacatcttatccagactagataaggtcgaagcggaggtccagatcgatagactaatcactggaagattgcagtccctacagacctacgtaacacagcaactaattagagcggcggagattagagcctctgctaatctagctgcgaccaagatgtccgaatgtgtcttgggacaatccaagagagtcgacttttgcggaaagggataccacctaatgtcttttccacaatctgcgccgcatggtgtcgtattcctacatgtaacatatgtgccggcgcaagaaaagaactttacaacagctccagcgatctgccatgatggaaaagctcattttccgagagagggagtctttgtctctaacggaactcattggttcgtcacccagagaaacttttacgagccgcagatcatcaccaccgacaacacatttgtttcgggaaactgcgacgtggtcatcggaatcgtaaacaataccgtctacgatccgttgcagccggaactagactccttcaaagaagagttggacaagtactttaagaaccacacctctccggatgtcgacttgggagatatttctggaatcaacgcgtccgtcgtcaacatccagaaagaaatcgatagattgaacgaggtcgcgaagaacttgaacgagtccctaatcgacctacaagagctaggaaaatacgagcagtacatcaagtggccgtggtacatttggctaggattcattgctggactaattgcgatcgtcatggtcaccatcatgctatgctgtatgacctcctgttgctcctgtctaaagggatgttgttcctgcggatcctgttgcaagttcgatgaagatgatagtgaaccggtcctaaagggtgtcaagctacactacacataaaagcttgtcgactattatattttttatctaaaaaactaaaaataaacattgattaaattttaatataatacttaaaaatggatgttgtgtcgttagataaaccgtttatgtattttgaggaaattgataatgagttagattacgaaccagaaagtgcaaatgaggtcgcaaaaaaactaccgtatcaaggacagttaaaactattactaggagaattattttttcttagtaagttacagcgacacggtatattagatggtgccaccgtagtgtatataggatcggctcctggtacacatatacgttatttgagagatcatttctataatttaggaatgattatcaaatggatgctaattgacggacgccatcatgatcctattctaaatggattgcgtgatgtgactctagtatggtcatag

SEQ ID NO: 55 - DNA, 4915 bp, Artificial Sequence
  Description of Artificial Sequence: Synthetic polynucleotide
gagtattctaggtgtttctatagaatgtaagaagtcatcgacattacttacttttttgaccgtgcgtaaaatgacccgagtatttaatagatttccagatatggcttattatcgaggagactgtttaaaagccgtttatgtaacaatgacttataaaaatactaaaactggagagactgattacacgtacctctctaatgggggttgcctgcatactatcgtaatggggtcgatggttgattattgattagtatattccttattctttttattcacacaaaaagaacatttttataaacatgaaaccactgtctaaatgtaattatgatcttgatttatagatgaagatcagcctttagaggattttaaccagtatgtttaatatgaaaaaaataaacataacatattttgagattaagcgctattgtgcttaattattttgctctataaactgaatatatagccacaattattgacgggcttgtttatgaccggcaatcggatcccacgatgtgctagactctctcgtctacgcggccgcaaaaattgaaattttattttttttttttggaatataaataatgttcgtgttcctagtcctactaccgctagtctcttcccagtgtgtaaacctaacaacgagaacacaactaccaccggcgtacaccaattctttcacaagaggagtatattacccggacaaggtgttcagatcctccgtactacattctacccaggacctattcctaccgttcttctctaacgtaacatggttccacgcgatccatgtctctggaacaaacggaacgaagagattcgataacccggtcttgccgttcaacgatggtgtatactttgcgtccaccgagaagtccaacatcatcagaggatggatcttcggaaccaccttggattctaagacccagtccttgctaatcgtcaacaacgcgaccaacgtcgtcatcaaagtctgcgaattccagttctgtaacgacccgtttttgggagtctactaccacaagaacaacaagtcctggatggaatccgagttcagagtctactcttccgcgaacaactgcaccttcgaatatgtatctcagccgttcctaatggacctagagggaaagcagggaaacttcaagaacctaagagagttcgtattcaagaacatcgacggatacttcaagatctactccaagcacaccccgatcaacctagttagagatctaccgcaaggattctctgcgctagaaccgttagtagatttgccgatcggaatcaacatcaccagattccagacactactagcgctacacagatcttacctaacgccgggagattcttcttctggatggactgctggtgctgcggcttattatgtaggatacctacagccgagaaccttcctattgaagtacaacgaaaacggaaccatcaccgatgccgtagattgtgctctagatccgctatccgaaacgaagtgcaccctaaagtctttcaccgtcgagaagggaatctaccagacctccaactttagagtacagccgaccgaatccatcgtcagatttccgaacatcacgaacctatgtccgttcggagaagtgttcaacgcgacaagatttgcgtctgtctatgcgtggaacagaaaaagaatcagtaactgcgtcgcggactactccgtcctatacaactctgcctctttctccacgttcaaatgctacggtgtatccccgacaaagctaaacgatctatgcttcaccaacgtctacgcggactccttcgtaatcagaggagatgaagttagacagattgcgccgggacaaactggaaagatcgcggattataactacaagctaccggacgacttcaccggatgtgtaattgcgtggaattcgaacaacctagactccaaagtcggaggaaactacaactacttgtacagactattcagaaagtccaacctaaagccgttcgagagagacatctccaccgaaatctatcaggctggatctacaccgtgtaatggtgtcgaaggattcaactgctacttcccgctacagtcttacggatttcaaccgacaaacggtgtaggatatcagccgtacagagtcgtcgtactatccttcgaactactacatgctccggcgacagtatgtggaccgaaaaagtctaccaacctagtcaagaacaaatgcgtcaactttaacttcaacggactaaccggaaccggtgtcctaaccgaatctaacaagaagtttctaccgttccagcagttcggaagagatatcgcggatacaacagacgctgtcagagatccgcaaaccttggagatcctagatatcaccccgtgttctttcggtggtgtctctgtaattactccgggaacgaacacctccaatcaagtagcggtactataccaggacgtgaactgtacagaagtaccggtagctattcacgcggatcaactaacaccaacttggagagtgtactccaccggatctaacgtattccaaacaagagcgggatgtctaatcggagcggaacacgtaaacaactcctacgaatgtgatatcccgattggagcgggaatctgtgcgtcttaccaaacacaaacaaactccccgagaagagcgagatctgtagcctctcaatctattatcgcctacaccatgtccttgggagccgaaaattctgtcgcgtactccaacaattctatcgcgatcccgacaaacttcaccatctctgtaacaaccgagatcctaccggtgtctatgaccaagacatctgtcgattgcaccatgtacatctgcggagattccaccgagtgctccaacctactactacagtacggatctttctgtacccagctaaacagagcgttgactggaatcgctgtagagcaggataagaacacccaagaggtattcgcgcaagtcaagcagatctataagactccgccgatcaaggacttcggaggttttaacttctctcagatcttgccggatccgtccaaaccgtctaagagatctttcatcgaggacctactattcaacaaagtcaccctagctgacgcgggattcatcaaacaatacggagattgcttgggagacattgcggcgagagatctaatttgcgcgcagaagtttaacggattgacagtactaccgccgctactaaccgatgagatgattgcgcagtacacgtctgctctattggcgggaacaattacaagtggatggacatttggagccggtgccgctctacaaattccgtttgctatgcaaatggcgtacagattcaacggaatcggagtaacccagaacgtcttgtacgagaaccagaagctaatcgcgaaccagttcaattccgcgatcggaaagatccaggacagtctatcttctactgcttcggcgttgggaaagctacaggatgtagtaaatcaaaacgcgcaggcgctaaacaccttggtcaagcaactatcctctaacttcggagcgatctcgtccgtcctaaacgacatcttatccagactagataaggtcgaagcggaggtccagatcgatagactaatcactggaagattgcagtccctacagacctacgtaacacagcaactaattagagcggcggagattagagcctctgctaatctagctgcgaccaagatgtccgaatgtgtcttgggacaatccaagagagtcgacttttgcggaaagggataccacctaatgtcttttccacaatctgcgccgcatggtgtcgtattcctacatgtaacatatgtgccggcgcaagaaaagaactttacaacagctccagcgatctgccatgatggaaaagctcattttccgagagagggagtctttgtctctaacggaactcattggttcgtcacccagagaaacttttacgagccgcagatcatcaccaccgacaacacatttgtttcgggaaactgcgacgtggtcatcggaatcgtaaacaataccgtctacgatccgttgcagccggaactagactccttcaaagaagagttggacaagtactttaagaaccacacctctccggatgtcgacttgggagatatttctggaatcaacgcgtccgtcgtcaacatccagaaagaaatcgatagattgaacgaggtcgcgaagaacttgaacgagtccctaatcgacctacaagagctaggaaaatacgagcagtacatcaagtggccgtggtacatttggctaggattcattgctggactaattgcgatcgtcatggtcaccatcatgctatgctgtatgacctcctgttgctcctgtctaaagggatgttgttcctgcggatcctgttgcaagttcgatgaagatgatagtgaaccggtcctaaagggtgtcaagctacactacacataaaagcttgtcgactaaaatagtttaactcttttaaaaccagtttggtactggaatttcagttcattactcgttgagaaattgatgatttttttaaaatgatattacttttatatgcttgcatcgcagaatgatattcacaagtattattaaaaatgagtatcggtagttacattaccatatcatccatgctcatatggatctccatccattatataatcaatgatacatgtattaaaatactttccgaataagtcttttaaatattgtattaattatgaaaaactatgctatgcgagtatgatgcaaagatgtttaatgatacgatactagattttatctctagcgagagatgtcgttagaatcatttatcataactacgtttaataataattcatcaacgaatatcgataacatgtgtcatttatactttaaatacgttaaagtctgtccgtcttctctattgtttagactgtttgtagaatgctgtgatataaacaaactagtagaaggta

SEQ ID NO: 56 - DNA, 23 bp, Artificial Sequence
  Description of Artificial Sequence: Synthetic primer
atgcgattcaaaaaagaatcagc

SEQ ID NO: 57 - DNA, 25 bp, Artificial Sequence
  Description of Artificial Sequence: Synthetic primer
caatttcctcaaaatacataaacgg

SEQ ID NO: 58 - DNA, 23 bp, Artificial Sequence
  Description of Artificial Sequence: Synthetic primer
tatcgcattttctaacgtgatgg

SEQ ID NO: 59 - DNA, 22 bp, Artificial Sequence
  Description of Artificial Sequence: Synthetic primer
cctcatttgcactttctggttc

SEQ ID NO: 60 - DNA, 22 bp, Artificial Sequence
  Description of Artificial Sequence: Synthetic primer
atagccacaattattgacgggc

SEQ ID NO: 61 - DNA, 29 bp, Artificial Sequence
  Description of Artificial Sequence: Synthetic primer
ggatgatatggtaatgtaactaccgatac

SEQ ID NO: 62 - DNA, 2000 bp, Artificial Sequence
  Description of Artificial Sequence: Synthetic polynucleotide
atttacggattcaccaataaaaataaactagagaaacttagtactaataaggaactagaatcgtatagttctagccctcttcaagaacccattaggttaaatgattttctgggactattggaatgtattaaaaagaatattcctctaacagatattccgacaaaggattgattactataaatggagaatgttcctaatgtatactttaatcctgtgtttatagagcccacgtttaaacattctttattaagtgtttataaacacagattaatagttttatttgaagtattcattgtattcattctaatatatgtattttttagatctgaattaaatatgttcttcatgcctaaacgaaaaatacccgatcctattgatagattacgacgtgctaatctagcgtgtgaagacgataagttaatgatctatggattaccatggatgacaactcaaacatctgcgttatcaataaatagtaaaccgatagtgtataaagattgtgcaaagcttttgcgatcaataaatggatcacaaccagtatctcttaacgatgttcttcgcagatgatgattcattttttaagtatttggctagtcaagatgatgaatcttcattatctgatatattgcaaatcactcaatatctagactttctgttattattattgatccaatcaaaaaataaattagaagccgtgggtcattgttatgaatctctttcagaggaatacagacaattgacaaaattcacagactttcaagattttaaaaaactgtttaacaaggtccctattgttacagatggaagggtcaaacttaataaaggatatttgttcgactttgtgattagtttgatgcgattcaaaaaagaatcctctctagctaccaccgcaatagatcctattagatacatagatcctcgtcgtgatatcgcattttctaacgtgatggatatattaaagttgaataaagtgaacaataattaattctttattgtcatctattatattttttatctaaaaaactaaaaataaacattgattaaattttaatataatacttaaaaatggatgttgtgtcgttagataaaccgtttatgtattttgaggaaattgataatgagttagattacgaaccagaaagtgcaaatgaggtcgcaaaaaaactaccgtatcaaggacagttaaaactattactaggagaattattttttcttagtaagttacagcgacacggtatattagatggtgccaccgtagtgtatataggatcggctcctggtacacatatacgttatttgagagatcatttctataatttaggaatgattatcaaatggatgctaattgacggacgccatcatgatcctattctaaatggattgcgtgatgtgactctagtgactcggttcgttgatgaggaatatctacgatccatcaaaaaacaactgcatccttctaagattattttaatttctgatgtaagatccaaacgaggaggaaatgaacctagtacggcggatttactaagtaattacgctctacaaaatgtcatgattagtattttaaaccccgtggcatctagtcttaaatggagatgcccgtttccagatcaatggatcaaggacttttatatcccacacggtaataaaatgttacaaccttttgctccttcatattcagctgaaatgagattattaagtatttataccggtgagaacatgagactgactcgagttaccaaattagacgctgtaaattatgaaaaaaagatgtactaccttaataagatcgtccgtaacaaagtagttgttaactttgattatcctaatcaggaatatgactattttcacatgtactttatgctgaggaccgtatactgcaataaaacatttcctactactaaagcaaaggtactatttctacaacaatctatatttcgtttcttaaatattccaacaacatcaactgaaaaagttagtcatgaaccaatacaacgtaa

SEQ ID NO: 63 - DNA, 6032 bp, Artificial Sequence
  Description of Artificial Sequence: Synthetic polynucleotide
atttacggattcaccaataaaaataaactagagaaacttagtactaataaggaactagaatcgtatagttctagccctcttcaagaacccattaggttaaatgattttctgggactattggaatgtattaaaaagaatattcctctaacagatattccgacaaaggattgattactataaatggagaatgttcctaatgtatactttaatcctgtgtttatagagcccacgtttaaacattctttattaagtgtttataaacacagattaatagttttatttgaagtattcattgtattcattctaatatatgtattttttagatctgaattaaatatgttcttcatgcctaaacgaaaaatacccgatcctattgatagattacgacgtgctaatctagcgtgtgaagacgataagttaatgatctatggattaccatggatgacaactcaaacatctgcgttatcaataaatagtaaaccgatagtgtataaagattgtgcaaagcttttgcgatcaataaatggatcacaaccagtatctcttaacgatgttcttcgcagatgatgattcattttttaagtatttggctagtcaagatgatgaatcttcattatctgatatattgcaaatcactcaatatctagactttctgttattattattgatccaatcaaaaaataaattagaagccgtgggtcattgttatgaatctctttcagaggaatacagacaattgacaaaattcacagactttcaagattttaaaaaactgtttaacaaggtccctattgttacagatggaagggtcaaacttaataaaggatatttgttcgactttgtgattagtttgatgcgattcaaaaaagaatcctctctagctaccaccgcaatagatcctattagatacatagatcctcgtcgtgatatcgcattttctaacgtgatggatatattaaagttgaataaagtgaacaataattaattctttattgtcatcttttattttttttttttggaatataaatatccggtaaaattgaaaaaatatacactaattagcgtctcgtttcagacgctagctcgaggttgggagctctccggatccaagcttatcgatttcgaacccggggtaccgaattcctcgaggttgggagctctccggatccaagcttatcgatttcgaacccggggtaccgaattcctcgagatgtttgttttccttgttttattgccactagtctctagtcagtgtgttaatcttacaaccagaactcaattaccccctgcatacactaattctttcacacgtggtgtttattaccctgacaaagttttcagatcctcagttttacattcaactcaggacttgttcttacctttcttttccaatgttacttggttccatgctatacatgtctctgggaccaatggtactaagaggtttgataaccctgtcctaccatttaatgatggtgtttattttgcttccactgagaagtctaacataataagaggctggatttttggtactactttagattcgaagacccagtccctacttattgttaataacgctactaatgttgttattaaagtctgtgaatttcaattttgtaatgatccatttttgggtgtttattaccacaaaaacaacaaaagttggatggaaagtgagttcagagtttattctagtgcgaataattgcacttttgaatatgtctctcagccttttcttatggaccttgaaggaaaacagggtaatttcaaaaatcttagggaatttgtgtttaagaatattgatggttattttaaaatatattctaagcacacgcctattaatttagtgcgtgatctccctcagggtttttcggctttagaaccattggtagatttgccaataggtattaacatcactaggtttcaaactttacttgctttacatagaagttatttgactcctggtgattcttcttcaggttggacagctggtgctgcagcttattatgtgggttatcttcaacctaggacttttctattaaaatataatgaaaatggaaccattacagatgctgtagactgtgcacttgaccctctctcagaaacaaagtgtacgttgaaatccttcactgtagaaaaaggaatctatcaaacttctaactttagagtccaaccaacagaatctattgttagatttcctaatattacaaacttgtgcccttttggtgaagtttttaacgccaccagatttgcatctgtttatgcttggaacaggaagagaatcagcaactgtgttgctgattattctgtcctatataattccgcatcattttccacttttaagtgttatggagtgtctcctactaaattaaatgatctctgctttactaatgtctatgcagattcatttgtaattagaggtgatgaagtcagacaaatcgctccagggcaaactggaaagattgctgattataattataaattaccagatgattttacaggctgcgttatagcttggaattctaacaatcttgattctaaggttggtggtaattataattacctgtatagattgtttaggaagtctaatctcaaaccttttgagagagatatttcaactgaaatctatcaggccggtagcacaccttgtaatggtgttgaaggttttaattgttactttcctttacaatcatatggtttccaacccactaatggtgttggttaccaaccatacagagtagtagtactttcttttgaacttctacatgcaccagcaactgtttgtggacctaaaaagtctactaatttggttaaaaacaaatgtgtcaatttcaacttcaatggtttaacaggcacaggtgttcttactgagtctaacaaaaagtttctgcctttccaacaatttggcagagacattgctgacactactgatgctgtccgtgatccacagacacttgagattcttgacattacaccatgttcttttggtggtgtcagtgttataacaccaggaacaaatacttctaaccaggttgctgttctttatcaggatgttaactgcacagaagtccctgttgctattcatgcagatcaacttactcctacttggcgtgtttattctacaggttctaatgtttttcaaacacgtgcaggctgtttaataggggctgaacatgtcaacaactcatatgagtgtgacatacccattggtgcaggtatatgcgctagttatcagactcagactaattctcctcggcgggcacgtagtgtagctagtcaatccatcattgcctacactatgtcacttggtgcagaaaattcagttgcttactctaataactctattgccatacccacaaattttactattagtgttaccacagaaattctaccagtgtctatgaccaagacatcagtagattgtacaatgtacatttgtggtgattcaactgaatgcagcaatcttttgttgcaatatggcagtttctgtacacaattaaaccgtgctttaactggaatagctgttgaacaagacaaaaacacccaagaagtttttgcacaagtcaaacaaatttacaaaacaccaccaattaaagattttggtggttttaatttttcacaaatattaccagatccatcaaaaccaagcaagaggtcatttattgaagatctacttttcaacaaagtgacacttgcagatgctggcttcatcaaacaatatggtgattgccttggtgatattgctgctagagacctcatttgtgcacaaaagtttaacggccttactgttttgccacctttgctcacagatgaaatgattgctcaatacacttctgcactgttagcgggtacaatcacttctggttggacctttggtgcaggtgctgcattacaaataccatttgctatgcaaatggcttataggtttaatggtattggagttacacagaatgttctctatgagaaccaaaaattgattgccaaccaatttaatagtgctattggcaaaattcaagactcactttcttccacagcaagtgcacttggaaaacttcaagatgtggtcaaccaaaatgcacaagctttaaacacgcttgttaaacaacttagctccaattttggtgcaatttcaagtgttttaaatgatatcctttcacgtcttgacaaagttgaggctgaagtgcaaattgataggttgatcacaggcagacttcaaagtttgcagacatatgtgactcaacaattaattagagctgcagaaatcagagcttctgctaatcttgctgctactaaaatgtcagagtgtgtacttggacaatcaaaaagagttgatttctgtggaaagggctatcatcttatgtccttccctcagtcagcacctcatggtgtagtcttcttgcatgtgacttatgtccctgcacaagaaaagaacttcacaactgctcctgccatttgtcatgatggaaaagcacactttcctcgtgaaggtgtctttgtttcaaatggcacacactggtttgtaacacaaaggaacttttatgaaccacaaatcattactacagacaacacatttgtgtctggtaactgtgatgttgtaataggaattgtcaacaacacagtttatgatcctttgcaacctgaattagactcattcaaggaggagttagataaatattttaagaatcatacatcaccagatgttgatttaggtgacatctctggcattaatgcttcagttgtaaacattcaaaaagaaattgaccgcctcaatgaggttgccaagaatttaaatgaatctctcatcgatctccaagaacttggaaagtatgagcagtatataaaatggccatggtacatttggctaggttttatagctggcttgattgccatagtaatggtgacaattatgctttgctgtatgaccagttgctgtagttgtctcaagggctgttgttcttgtggatcctgctgcaaatttgatgaagacgactctgagccagtgctcaaaggagtcaaattacattacacataatattatattttttatctaaaaaactaaaaataaacattgattaaattttaatataatacttaaaaatggatgttgtgtcgttagataaaccgtttatgtattttgaggaaattgataatgagttagattacgaaccagaaagtgcaaatgaggtcgcaaaaaaactaccgtatcaaggacagttaaaactattactaggagaattattttttcttagtaagttacagcgacacggtatattagatggtgccaccgtagtgtatataggatcggctcctggtacacatatacgttatttgagagatcatttctataatttaggaatgattatcaaatggatgctaattgacggacgccatcatgatcctattctaaatggattgcgtgatgtgactctagtgactcggttcgttgatgaggaatatctacgatccatcaaaaaacaactgcatccttctaagattattttaatttctgatgtaagatccaaacgaggaggaaatgaacctagtacggcggatttactaagtaattacgctctacaaaatgtcatgattagtattttaaaccccgtggcatctagtcttaaatggagatgcccgtttccagatcaatggatcaaggacttttatatcccacacggtaataaaatgttacaaccttttgctccttcatattcagctgaaatgagattattaagtatttataccggtgagaacatgagactgactcgagttaccaaattagacgctgtaaattatgaaaaaaagatgtactaccttaataagatcgtccgtaacaaagtagttgttaactttgattatcctaatcaggaatatgactattttcacatgtactttatgctgaggaccgtatactgcaataaaacatttcctactactaaagcaaaggtactatttctacaacaatctatatttcgtttcttaaatattccaacaacatcaactgaaaaagttagtcatgaaccaatacaacgtaa

SEQ ID NO: 64 - DNA, 5978 bp, Artificial Sequence; identical to SEQ ID NO: 43
  Description of Artificial Sequence: Synthetic polynucleotide

SEQ ID NO: 65 - DNA, 5978 bp, Artificial Sequence; identical to SEQ ID NO: 44
  Description of Artificial Sequence: Synthetic polynucleotide

1. A recombinant poxvirus comprising a nucleic acid encoding a SARS-CoV-2 virus protein, wherein the SARS-CoV-2 protein is selected from the group consisting of the spike protein (S), the membrane protein (M) and the nucleocapsid protein (N), or combinations of two or more of said proteins.

2. The recombinant poxvirus according to claim 1, wherein the poxvirus is an orthopoxvirus.

3. The recombinant poxvirus according to claim 2, wherein the orthopoxvirus is selected from the group consisting of camelpox (CMLV) virus, cowpox virus (CPXV), ectromelia virus (ECTV), horsepox virus (HPXV), monkeypox virus (MPXV), vaccinia virus (VACV), variola virus (VARV), rabbitpox virus (RPXV), raccoon poxvirus, skunkpox virus, Taterapox virus, Uasin Gishu disease virus and volepox virus.

4. The recombinant poxvirus according to claim 2, wherein the orthopoxvirus is a horsepox virus or a vaccinia virus.

5. The recombinant poxvirus according to claim 4, wherein the horsepox virus is strain MNR-76 and wherein the vaccinia virus is selected from the group of strains consisting of: Western Reserve, Western Reserve Clone 3, Tian Tian, Tian Tian clone TP5, Tian Tian clone TP3, NYCBH, NYCBH clone Acambis 2000 (ACAM 2000), Wyeth, Copenhagen, Lister, Lister 107, Lister-LO, Lister GL-ONC1, Lister GL-ONC2, Lister GL-ONC3, Lister GL-ONC4, Lister CTC1, Lister IMG2 (Turbo FP635), IHD-W, LC16m18, Lederle, Tashkent clone TKT3, Tashkent clone TKT4, USSR, Evans, Praha, L-IVP, V-VET1 or LIVP 6.1.1, Ikeda, EM-63, Malbran, Duke, 3737, CV-1, Connaught Laboratories, Serro 2, CM-01, NYCBH Dryvax clone DPP13, NYCBH Dryvax clone DPP15, NYCBH Dryvax clone DPP20, NYCBH Dryvax clone DPP17, NYCBH Dryvax clone DPP21, VACV-IOC, Mulford 1902, Chorioallantoid Vaccinia virus Ankara (CVA), Modified vaccinia Ankara (MVA), and MVA-BN.

6-7. (canceled)

8. The recombinant poxvirus according to claim 1, wherein the SARS-CoV-2 protein is the S protein.

9. The recombinant poxvirus according to claim 1, wherein the amino acid sequence of the SARS-CoV-2 virus protein is modified with reference to a wild type protein or modified to infect mice.

10. (canceled)

11. The recombinant poxvirus according to claim 8, wherein the amino acid sequence of the SARS-CoV-2 virus S protein comprises one or more substitutions selected from Y459H, D614G, S943P, K986P and V987P, with reference to a wild type S protein (SEQ ID NO: 47).

12. The recombinant poxvirus according to claim 1, wherein the nucleic acid encoding the SARS-CoV-2 virus protein is located in a region of the poxvirus that is not essential for replication of the poxvirus.

13. The recombinant poxvirus according to claim 12, wherein the nucleic acid encoding a SARS-CoV-2 virus protein is located in the thymidine kinase (TK) gene locus of the poxvirus or in the B22R homolog gene locus of the poxvirus.

14. (canceled)

15. The recombinant poxvirus according to claim 1, wherein the nucleic acid encoding the SARS-CoV-2 virus protein is operatively linked to a promoter.

16. The recombinant poxvirus according to claim 15, wherein the promoter is a poxvirus-specific promoter.

17. The recombinant poxvirus according to claim 16, wherein the poxvirus specific promoter is a vaccinia virus early promoter, a vaccinia virus late promoter, or a tandem of a vaccinia virus early and late promoter.

18-19. (canceled)

20. The recombinant poxvirus according to claim 1, wherein the poxvirus is a synthetic poxvirus.

21. The recombinant poxvirus according to claim 20, wherein the synthetic poxvirus is selected from the group consisting of TNX-2200 (synVACVΔA2K105^{SARS-CoV2-Spike-co}), TNX-2200 clone 1.1.1.1.1, TNX-2200 clone 2.1.1.1.1, TNX-1800 (scHPXVΔ200^{SARS-COV2-Spike-co}), TNX-1800a, TNX-1800a-1, TNX-1800b, and TNX-1800b-2.

22. The recombinant poxvirus according to claim 21, wherein the recombinant poxvirus is TNX-1800b-2 or TNX-1800a-1.

23. (canceled)

24. The recombinant poxvirus according to claim 20, wherein the synthetic poxvirus comprises any one of SEQ ID NOs: 63, 64 or 65.

25. A pharmaceutical composition comprising a recombinant poxvirus according to claim 1 and a pharmaceutically acceptable carrier.

26-29. (canceled)

30. A cell infected with a recombinant poxvirus according to claim 1, wherein the cell is an adherent cell or a suspension cell.

31. The cell according to claim 30, wherein the cell is a mammalian cell or an avian cell.

32. The cell according to claim 31, wherein the mammalian cell is a Vero cell, a Vero E6 cell, a BSC-40 cell, a Vero adherent cell, a Vero suspension cell, a BHK-21 cell, an ACE2 Knockout Vero cell, or an MRC-5 cell, and wherein the avian cell is a chicken embryo fibroblast, a duck embryo-derived cell, an EB66® cell, an AGE1.CRpIX® cell, or a DF-1 cell.

33-38. (canceled)

39. A method for selecting a cell that expresses a SARS-CoV-2 virus protein, comprising infecting a cell with a recombinant poxvirus according to claim 1 and selecting the infected cell expressing said SARS-CoV-2 virus protein.

40-43. (canceled)

44. A method of inducing an immune response against a SARS-CoV-2 virus or a SARS-CoV-2 virus and a poxvirus in a subject, comprising administering to said subject an immunologically effective amount of the recombinant poxvirus according to claim 1.

45. The method of inducing an immune response against a SARS-CoV-2 virus or a SARS-CoV-2 virus and a poxvirus in a subject according to claim 44, wherein said immunologically effective amount of the recombinant poxvirus is administered by scarification.

46. The method of inducing an immune response against a SARS-CoV-2 virus or a SARS-CoV-2 virus and a poxvirus in a subject according to claim 44, wherein said immune response comprises antibodies that are capable of neutralizing the SARS-CoV-2 virus or a SARS-CoV-2 virus and a poxvirus.

47. The method of inducing an immune response against a SARS-CoV-2 virus or a SARS-CoV-2 virus and a poxvirus in a subject according to claim 44, wherein the immunologically effective amount of a recombinant poxvirus is capable of protecting the subject from SARS-CoV-2 virus or a SARS-CoV-2 virus and a poxvirus, or reducing or preventing the progression of a SARS-CoV-2 virus or a SARS-COV-2 and poxvirus infection in the subject.

48. (canceled)

49. The method of inducing an immune response against a SARS-CoV-2 virus or a SARS-CoV-2 virus and a poxvirus in a subject according to claim 44, wherein the immune response is a T-cell immune response.

50-55. (canceled)

56. The method of inducing an immune response against a SARS-CoV-2 virus or a SARS-CoV-2 virus and a poxvirus according to claim 44, wherein the poxvirus is vaccinia virus, variola, horsepox virus or monkeypox virus.

57. A method of inducing T cell immunity against a SARS-CoV-2 virus or a SARS-CoV-2 virus and a poxvirus comprising administering to said subject an immunologically effective amount of a recombinant poxvirus according to claim 1.

58. The method of inducing T cell immunity against a SARS-CoV-2 virus or a SARS-CoV-2 virus and a poxvirus according to claim 57, wherein said immunologically effective amount of the recombinant poxvirus is administered by scarification.

59. The method of inducing T cell immunity against a SARS-CoV-2 virus or a SARS-CoV-2 virus and a poxvirus according to claim 57, wherein the immunologically effective amount of a recombinant poxvirus is capable of protecting the subject from SARS-CoV-2 virus or a SARS-CoV-2 virus and a poxvirus, or reduces or prevents the progression of a SARS-CoV-2 virus or a SARS-CoV-2 and a poxvirus infection in the subject.

60-64. (canceled)

65. The method of inducing T cell immunity against a SARS-CoV-2 virus or SARS-CoV-2 virus and a poxvirus according to claim 57, wherein the poxvirus is vaccinia virus, variola, horsepox virus or monkeypox virus.

66. A method of generating a recombinant poxvirus according to claim 1, the method comprising:
(a) Infecting a host cell with a poxvirus;
(b) Transfecting the infected cell of step (a) with a nucleic acid encoding a SARS-CoV-2 virus protein to generate a recombinant poxvirus; and
(c) Selecting a recombinant poxvirus, wherein the nucleic acid encoding a SARS-CoV-2 virus protein is located, upon transfection, in a region of the poxvirus that is not essential for the replication of the poxvirus.

67-82. (canceled)

83. A method of reducing or preventing the progression of a SARS-CoV-2 virus infection or a SARS-CoV-2 and poxvirus infection in a subject in need or at risk thereof comprising administering to said subject an immunologically effective amount of the recombinant poxvirus according to claim 1.

84-85. (canceled)

86. A vaccine against a SARS-CoV-2 virus comprising a recombinant virus according to claim 1.

87. A bivalent vaccine against a SARS-CoV-2 virus and a poxvirus comprising a recombinant virus according to claim 1.

88. (canceled)
